United States Patent Application Publication US 2026/0357256 A1 - sequence listing, part 24

SEQ ID NO: 9 - DNA, 58617616 bp, Homo sapiens (residues 49,933,530-52,104,552 of 58,617,616)
  source 1..58617616: mol_type = genomic DNA
ctcttgaatttcaaacctggtttcttacaggtggttgtctggggtgggtggagtggcgacaggatagagctgaaggactatgcaaatgaggaagtaagtcagggcgggctttgagaaggggacccatatcctacaggcaaaaagcaggctaggtgaccttgggacactacgctaagggagggaggctaaaggcggccaggtttgcagtgcgggaagatgagcaggccagtgggaggaggggcagggcagggctgtagttggtgactgggtgttcattttagctctaagaaaaaaaatcagtgtttcgtgaaggtgttggagaggggctgtgtctgggtgagggatggcggggtactgatttttttgggaggttatgagcaaaaataaaacgaaacatttcctctggcttgtgcatcttgtctttgagagaagcagctggggagaggcggccttgtaatctcagcactttgagaggctgaggcgggcagatcacctgaggtcaggagttcaggaccagcctgaccaacaaggtgaaaccccatctctactgaaaatacaaaattagctgggtgtggtggcgtgtgcctgtaatcccggcaacttgggaggctgaggcaggagactcgcttgagccaaggagacggaggttgcagtgagccaagattgttctattgcactccagtctgggaaacaagattgaaacgctatctcaaaaaaaaaaaaaaaaaaaaagggggggggaggtggggagggccgggcgtggtgactcacgcctgtaatcccagcactttgggaggctgaggtgggcagatcacgaggtcaggagattgagaccatcctggctaacacggtgaaaccctgtctttactaaaaatatgaaaaattagccgggtgtggtggcgggcgcctgtggtcccagctactcgggaggctgaggcaggagaatcacttcaacctaggaggcagagcttgcagtgagcctagattgcgccactgcactccagcctgggcgacagagcaatactccatctcaaaaaaaaaagaaaaagacagtaataaagataacagggtgggtgcagtggctcacgcctgcaatcccagcactttgggaggctttgccaggtgaattgcttgagcccagaaggtggaaatcagcctggataacataatgagacctcatctctacaaaaaataatttttaagaaaatggctgggtgctgtggcttacgcttgtaatcccagcactttgggaggccaaggtgggtggatcacctgaggtcaggagttcgagaccagcctgactaacatggtgaaaccctgtttctactaaaaatacaaaattagccaggcatggtggtgggcgcctgtaatcccagctacttgggaggctcaggcaggagaatcccctaaacctgggaggcggaggttgcagtgagctgagatcgcaccattgcattccagcctcagcaacaagagtggaactccatctcaaaaaaaaaaaaagaaaaaaaattagtgggtgaggtggtgtgcacctgtagtcctacatacttgggaggctgaggcaggaggatcgcttgaggccagaagttggggaccagccttggcaacatagcaagatgctgtctctacaaaaaaaaaattaggtggggccgggcgccttggctcaacgtctgtaatcccagcactttgggaggccgaggcgggcgaatcatttgaggtcaggagttcaagaccagcctggccagcatggtgaaacctcatctactaaaaatacaaaaaaaattagccaggcatggtggcgcatgcctgtagtcccagctacctgggaggctgaggcaggagaatggcttgaacccaggaggcagaggttgcagtgagctgagatcacaccattacactccagcctgggcaacagagcaaggctctgtctcaaaaaaaaaaaaaaaagaaaagaaaaagaaaagaaagaaaattagctgggcgtggtggcatgaacctgtagtctgtagttccaggtactcaggaggctgaggcggggggattgcttgaacccaaaggttgaggctgcagtgagccatgtttgtgccattgcactccagcctgggtgacaaagcaagaacctgttaaaaaaaaaaaaaaaaagactgggcacagtggctcatgcctgtaatcccagcactttgggaggctgaggtgggtggatcacgaggtcaagcaatggagaccatcctggccaacatggtgaaaccccgtctctatgaaaaatacaaaaattagctgggcatggtggtgcacacttgtggtcccagctactcaggaggctgaggcaggagaattgcttgaactcaggaggcagaggttgcattgagccgagatcgtgccactgcactccagcctgggcaacagagcaagactgtctcaaaaaataataataaataaatacataaataaaagaaaaaagaaaaaaaaagttctccacccagcagcaaagcatctttctttgcaacagtgcggaattttaccggagccttgcgtgtgtggacaacagcgacagtgaagaaatccccccacttttccggcccaggtgtagtggctgacccctgtaatccctacactttgggaggccaaagtgggaggatcgtttgagcccaggagcttgagaacaacctgggcaacatagcacgaccctgtctctacaaaaagttaaaaaaaactaacaacaaaaaagaaatcctcccgcttttttgcattccaggagatggcttactgagaagaaccacccttccgtatatgacttagataagacttgaggatgaaccccttgtctaagacaagggcagacatagaccctccaaattcccatttcgttgtctcgtacatgattaactgaactgttttgtccccagtgatcaattgaaacaaaatgcttgtttaacctaacttactctcctcactgccaggcctctgaatttcagtccatccacagcctcagccagaatacagcccctccttaagcacctctcctgagaagaataaaacattccctggtcgattgtcctgtacaatagcccttgcatcttattttcccacagctggttctttctaaccttgtttactcctccccataaaagaaaaagtctttggctgtgcacatggcctgcgcctgtggtgccagcactttgggaggctgaggaggatcccttgagttctggaattccagagcagcctgggcaacatagcaagaccccatctctacaaaaaaattacaaattagccgtgcatgatggcacgacagtgagctgagattgcaccactgcactgcagcctggcgacagagtgagattctgtctcaaaaaaaaaaaaaaaggaaaaaaacctgcccaattcttgtctcacttgcaaatcttttgcttctccctattgcaatgtcctcacctttatagcaatagtccctttcccaccttaaaaaaatcctttcaaataaagtttctttcctcaaggctgcagtgagccatgattgcgtctgggtgacatagccagactgagtctctaaataaagtctcctcaccaagtatgatttttttaattgaggtgaaattcatataatagaaaaccattttacagggaacatttcatagaacagtggcatttagtacattcgcggttctgtgcaactactgcctctctttcctaatcacttctatcactccaaaagaaaacctcatccccgttaagcagttacttcccacttctgccttctgatgtgttttgtatttgtattcattgaatgcttgcaattccatgaagtggggaaatgagtataagtctgtttttttttttttcagacagagtcttactctgtggcccaggctggagtgtagtggcgcgatcttggctcactgcaacctctgtctcccgagttcaagcgattctccggcctcagcctcctgagtagctgggaccacaggtgcacaccaccaagtccagataatttttgtatttttagtagagacggggtttcaccatgttggccaggctggtctcgactcctgacctcacgtgatccgcccacctcagccttccaaactgctgggactataggtgtgacccaccgcgccgggcgcgaaatgatttcttactgtgagtcatggtcagaaaagtttgaaagccactggtaggctccccccagcttgacatactgattttcagacaatagccggtttgcagaccccacgcttccaaaaccaatcatttctggcctctgggcggagtttgtcttagcaggagtctgccgccaggtggcgcgcgtaccccgccgggagtgggttttgctccatcccagactcagaccgtccaagccggtgatttccttctggtcggtttacggggactagaagccctgacttcgaatacagttcacaaagcagacccctgcagggggttttaggcggctaagaagggaattggctctcctaagactctctttctccagagagctcattaaatgcctcccgcgccagaaggggtccccgcccccggagctcgcatcccagtggggaggacacacacaaaccccattcgcgatcccgtcagtgcagggaggctccggcctggggccgaagagccgagtctctctggtgcctgacagcacgggatagagccccgcccggccacctgctggctgtgtgaccttgggaatagtgcttggcctcgctgtgccttggttccctccactataaaatggcagtgataacagcagccacttcatagggttccgggcattgcgtaagttaatacatgcaaagcgctcagaagggatggtgcatgtttgtcgaacccgttgttaaaaattcccattttaggctgggcgcagtcactcacacctgtaatcccagcacttcgggaggccgaggcgggcggatcacctaaggtcaggagttcgagaccagcctggccaacatggtgaaaccccgtctctactaaaaatacaaaaattagccaggcgtggtggcatgcgcctgtaatcccagctattcaggaggctgaggcaggagaatcgcttgaacccgggaggcggaggttgcagtgagatgagatcacaccactgcactccagcctgggtgacagagtgagaccctgtctcaaaaaaaatttcttattttacagaagagaaaaccaaggacaagaacagggtagtgaatcaccaagcccacattttttttttttttttctgcaggaagatctccaagttgagtccagtggtctgactcccagcccagatggccttccctcggccttgtgcttgcttgcttggggtggaagtggagccagctcccttgggatagctgctcaagccccgagtgaaatcctcccgcagaggacattggccccctgttggcatcagtgctgggactcgaatgaaactctgtttctgcctgggtcaggagaatagctagattaaataaataagtcactgtaatgtcacagggtgaacccccaaattgggattcagcctgggaggccacatgagttgttggcttcgtgcagaaaagaattcaagagtgagccagcagagtaaagtgaaagcaagtgaaggaggccgggcgcggtggctcacgcctgtaatcccagcactttgggaggccaaggtgggaggatcacttgagtccaggatttcgagaccatcttgggcaacatggcgaaaccctgtctctacaaacaatacaaaaattagctgggtgtggtggtgtatgcctgtaatcccagctacttgggaggctgaagtaggagaatcacttgaacccagggggcagaggttgcagtgaaccaagattgtgccattgcatgctagcctgggtgacagagcaagactctgtcttaacaaaaataaaaaataaaaaaaaaattaaggctgggcgcagtggctcacgcctgtaatcccagcactttgggaggctgaggtgggcggatcacgaggtcaggagattgagaccatccttgctaacatggtgaaactgtgtctctactaaaattaaaaaaaaaaaaaagttagctgggtgtgggggcaggcgcctgtactcctagctactcgagaggcggaggcaggagaatggtgtgaacctgggaggcggagcttgcagtgggccgagattgcaccactgcactccagcctgggccagagtgagactctgtctcaaaaaaaaaaaaaaaaaaatataggctaaaataaacaaaggactgccaccacggccacggccactaccgacacctcaccaggggccaaagcatgtatttcccagagcctgagagctgcatgcctggggctgctgccattgacagcagtcctgcccctgcaccagcagcagtgccatgcacatttgtacatgccctgaggacaggatctccttgccgacaactgccactaccactaacacccaagcatgccacatagcagccaagggattgcctcagcctgttcaccacctgcacccacgtgcaccaccacagggcctgaggacgggcccacccagtcaggcactgctccccacaatgcccaagcatgctgcctagggccctggcattgccctgcccatctgccaccactggtatctatatactcctcctgggggtctgaggatgggtctacccagcctgctgccaccatcaccactggcacacactgacatgcatcacccacctagcccatctcagccactggtaacaccagtgtttgctgcctgggaagttaaggattgtcccaccattgccactgccaccatcatgccatgcatgcagcccagggacccaaggacccactcatcatccttgctgactgctgcccctgctggcaccaaagtgagccacgtggaggttcatgaattggcccatctggacctgttaacaccagtacttgtgtatacccccaaaggccaaaggataggtatgctcagcctgcctctgtcaccactggaggccaaggattgacccacctggcatcccatccccagcaaagtctcaatacagcctccagtgacaaccacatcctaagccactgaggaagtcagacactactaatgctgtttgtagctgaaaaaatcatagagactacatgactgcacgctagaatcaaagctgaagagcattacccagtgaacaccacagatacgatgtcttcatgaaaaagtcttccgttatgaaagccaatccaaaaaatgggaagaagtgactgttacaccagacgcgcaaaaatcaatgtagggacataagagacttgaaaaagcaagaaaatatgaaacctccaaaggagtgtgataatgctcacacaacaaattccaatgaaaagaaatttataaagtgccagtgtgggcggcaagccacccaggtgccgaggcaagagaccgagggcacgagctgttccagtatagtaaaatatataaaacaacaagagttatactagatctagatcacagacatgattacatatgaatatcattaatcattagtttgtagcaattactccttattccaatattataataatcctcgctctacaatcataacctaggaaaaaccaggccatacagagataggagctgaggggacatagtgtgaagtgaccagaagacaagagtgcgagccttctgttatgcccggacagggccattagaggcctccttggtctagcggtaacgccagcgtctgggaacacgcctgttgctaagcggacagtggtctagtggtagcctcagtgtcaaggaaaaccacccgctacttagcggaccaggaaagggagtctctctttccccgggggagtttagagaagactctactcctccacctcttgtggagggcctgacatcagtcaggctcgcctgcagttatccggaggcctaaccatctccctgtgatgctgtgcttcagctcctagtccaccttcatgttccatcctgtacacctggctctgccttctagatagcaatagcaaaattagtgaaagtactaaaagtctgatatgcagaaataatggcataagctgtctctctctctttctcctctctctctctgccttggctgccaggcagggaagggccccctgtccagtggacacgtgacccatgtgaccttacctatcactggagatgactcacactctttaccctgccccttttgctttgtatccaataaataacagcacagccagacattcggggccactacgggtctccacgtcttggtggtagtggtcccccgggcccagctgtcttttttttaatctttgtcttgtgtctttatttctacaatctcttgtctccgcacacggggagaaaaacccactgaccctgtggggctagtccctacagccagaaaaaggattcaaaatattgctattaaagaatttcagtgaggtctgggcatggtggctcatgcctgtaatcccagcactttgggaggccgaggcgggtggatcatctaaagtcaggagttcaacaccagcctggttaacatagcgaaaccctgtctctactaaaaatacaaaacttagccgggcatagtggtgggcgccagtaatcccagctacttaggaagctgaggcaggggaatcacttgaacccaggaggcggaggttgcagtaagccgagattgtgccactgctctccagcctgagtaacagagtgagactctgtctcaaaaaacaaacaaacagcctgggcgtggcgactcatgcctgtaatcccagcactttgggaggccgaggtgggcggatcacgaggtcaggaggtcgagaccatcctggctaaaaatacaaaaaaattagctgggcgtgctggcgggcacctgtagtcccagctactcaggaggctgaggcaggagaatggcatgaacccgggaggcggagcttgcagtgagccaagatcgtgccactgcactccagcctgggtgatggagcaagactgtctcaaaaaacaaaacaaaacaaaaaaaaacccaaaaccgaaaaactttcaagtctctaggcatagaaggaacatatctcaacacaataaaggccatctatgacaaactcacaacgaacgttatactgaatggggaaaagctgaaaaccttttctcaaagaactagaataagacaaggaagtctacctctaccactcctattaaacatagtaccagaagccctagccagaacaatcagacaagataatgaaacaaaaggtatccaaattggaaaacaggaagtcaaatagtccttatttgcagattgcatgatcttatacttagaaaaacttcatcagaaaacttttaggtctgataaaccaattgtggcaggatacaaaatcaacatacaaaaatcagtagcaaacctatacaccaataatgaactggctgaaaaagaaatcaagaaagcaatcccatttacaatagctacaaaaaaaaaaaaaagaaaaagaagaagaaacttaggaataaatttaactaaggaaatgaaagactttgacaagaaaaactacaaaacactgatgaaagaagctgaagatgcaaacgaatggaaaggcatcttgtactcatggattggaagaatattgttaagataacattactacccagagcaacctatggattgaatgcaatccctagcaagaaaccaatgacaatttaggaaaagcaatcctaaaattcgtatggaaccaaaaaagcttgaataaccagagcaatcctgggcaaaaagaacaaagctggaggcaccacactacttgacttcagaatgtattataaagctataataaccacaacagcatggtgttgctataaaaacagacacatagaccaggggaacagaacagagaacccagaaataaacccacatatttacagccaactgattttcaacgaaggtgccaagaacttacattgggaaaaagacatcctcttcaatagatggtgctgagaaaactgggtatccatatgcagaagaatgaaattagacccccatctctcaccatatacaaaaaccgactcaaaatggaatagaaacttaagcgtgagacctgaaagtataaaactactaaaatgaaacataggaaaaattatccaagacattggtctaggcaaagattttatggttaagacttcaaaagaacaggcaacaaaaacaaaaatagacagatgggactacattaaaccaaaagcttcttcgcagaaaaggaaacagccaatggaatgaacagacagtatgttgaatgggagacaatacttgcaaattattcatctgaccaaggactaatatccagaatatacaaggaatgcaaacaactcaacagcaaaagaacaaccacattaaaaagcaggcaaaggacatgaatagatatttctaaaaataaaacataatggtcgggcatggtggttcatgcctgtaatcccagcactttgggaggccgaggcaggcggatcacctgaggtcaggagttcgagaccagcctggccaacatggtgaaaccctgtctctactaaaaatatatattaaaaaattagctgggcatggtggtgcatgcctgtagtcctagctacccagggggtcaaggcaggagactcgcttgaacctgggaggtggaggttgcagtgtgccgagatcacaccattgcactccagcctgggtgacagagtgagactccatcttaaacaaacaaaaaaagaagacatacaaatggccaacaggaatatgaaaaaatattctaatccctaatcatcggagaaatgcaaataaaaaccacagtgagatatcatcctaccctggttagaatggctattataaaaaagacaaaaaataacatgcctggaaagattccatcccagaaaagtgaactcttcttttttttttttttttttgagacagagttcactcttgttgcccaggctggagtgcaatggcaccatcttggctcaccgcaaccttcgcctcccgggttcaagcgcttctcctgcctcagcctcctgagtagctgggattacaggcatgcgccaccacgcccggctaattttgtattttcagtagagacagggtttctccatattggtcaggctggtctcaaactcctgacctcaggtgatctgcctgcctcagcctcccaaagggctgggattacaggcgtgagccaccgcgaccagccagaaaagggaactcttctacactgttggtggaaatgcaaattagtgtagtcattatgagaagagtatggcgatttcttcaaaaactaaacctagaactaccatatgagtcagcaatcccactactgggtatgtatccaaaagaaaggaagtcaatatatcaaaaggatacctgcacctccatgtagattacaccactattcataacagtaaagatacggaatcaacctaaatgtctatcaatttatctatttcttttataagaaaatcctctcaggctgggtgcggtggctcatgcctgtaatcccagcactttgggaggcccaggcgggtggatcacgaggtcaggagattgagaccatcctggctaacatggtgaaaccccgtctctactaaagatataaaaaattagccgggcgtggtggcgggcgcctgtagtcccagctactagggaggctgaggcaggagaatggcgtgaacccgggaggcggagcttgcagtgagccgagatcgcaccactgcactccagcctgggcgacagagcgagactctgtctcaaaaaaaaaaaaaaaaaatctttatcctcattgtttccacattgagtaggctgaggaggaagaggaagaggagagactcattttgctgtctcaggggtggcagaagaggaagaaaatctgtgtataacccagtgtaaacttgtgctgttcaaaggtcagctgtacacacacatagacacacaaaacatgcataatacagttgaatactactcagccataagataaagaaatcctgccatttgcaacaacagagttaactctaaatcagacgtagacaaataccgtgctatctcacggatgcgtggaatccacagaagtcaaactgtcactagagagttgtccaggttcttggcgtgttgaacaaagaattgaacaaaatgcacaaatcaagtaacaaaagaaaatgcaaggagggaaaaaccagcagaagaatggagtaacaaaagcacagattttttttaagttctggggtacatgtgcaggacgtgcagctttgttacataggtaaacgtgtgccatggtggtttgctgcacctatcaacccatcacctaggtattaagcccagcatgcattagctgtttttcctaatcccgtccctcccccggccccttgacaggccccagtgtgggtttttccccttcctgtgtccatgtgttctcattgttcagctcctacttataagtgagaacatgtggtgtttggctttctgttcctgtgttagtttgctgaggataatggcttccggctccatccatgtccctgcaaaggacatgatcatccttttttctggctgcatagtattccatggtgtatatgcaccattttctttttctttttcttttttttttttttttttttgagacagagtcttactctgttgcccaggctggagtgcagtggcgtaatcttggcccactgcaacgtctgccttccgggttcaagtgattctcctgcctcagcctcccgagtagctgggactacaggcacccgccaccacaccctgcttttttgtatttttagtagagacggggtctcaccatgttggccaggataatctccatctcttgacctcgtgatccacctgcctcggcctcccaaagttctgggattacaggcgtgagccactgcacccagcccaccacattttctttatccagtctatcattgatgggcatttgggttgattccaggtctttgctattgtgaatagaaaagcacagatttattgaagacaattcagagtgggagcgggatcgagccagcagctcaagagcctccccaattaaggtttgtaataagctagaaggaacccggcaacacccctagacgcccttcagaggcttccaattggttagatgctatgaaggattggctcaggaccaatcagtggccgtagtggagacccggcccgcagtcaatcagaggctgatgtggcttgttatcaccagggaagacgtgacctgtaagccacacctgctgctctcctgcctgtaggaactggctgcacctgctgaacccctgttcctctaatcccctattctcctgccacaaaactcatggaaacaaagtagaattagaaccgtggttgctgggggctaggaggggagaaaaacagacagatgtcggtcaaagggtagaaacttgcatttacaagatggggtcagcccggcatggtggctcacacctgtaatcttagcacttttggaggctgaggcgggaggactgcttgaggccaggactttgagaccagcctgggcaacatagtgagatctcgtttctttcttttcttttctttttttgagacagagttttgcttttggcgtccaggctggagtgcaatggcgcgatctcagctcactgcagcctcggccccccgggtttaagtatttctcctgcctcagcctccctagtagctgggattataggcacccactaccaggccctgctaatttttgtatttttagtagtgatggcatgattacaggcgtgaggcaccgcaccctgccgtgagatcccgtttctacaaaataaataaataaataaataattacctgggtgtgatggcatgtgcctgtggttctagctacttaggaggctttagtgggaggatcacttgagcccaggagattgaggctgcagtgagctgcagtgagctgcagtgccactgcactccagcctgggtagcagagcaagaccctgtctcaacaaccaaccaaccaacaatcagttctgggagtctactgtacagcatggtgactacagttaacaatactgtatcgcatacttgaaatttgttaacagagtacatcttaagtgtttctgccacacacacacccaaagagaactgtggaggtggctgggcatggtggctcatgcctgtaatcccagcactttgagaggccgaaaggggcagatcacctgaggtcaggagttcgagattagcctggccaacatggtgaaatcctgactctactagaaatacaaaaattagccaggcatgctggcacgcgactgtaatcccagctactcgagaggctgaggcaggagaatcgcttgaaacccgggaggtggaggttgcagtgagctgagatcgtgccattgcactccagcctgggtgacggagcgagacttggtcttaaaaaaaaaaaaaaaaaaggagagagacctatgaaggtgatggaacaggtagtgctcatttcagaatgtatacaaatatcaaaacatcatgatgttcatggtaaatatactcaatttttatctttcagttatgcctcaaaaatctggaaaaagaaaaaaaaaaccctttagagtggaggagaaggaagcaagtggggcacagggagaaacgagctgagacacagaccaaccccagcgtcagctgagacttcagagacttctgaggctggaactgccctgcagaggccaccatcagggtcaggatggtcagaactttatacctagtgggctcccctaagaaaaagtgtgactcaggcgagggactcgctgcacacacgcctctgtgggatactttatttatttatttttgagatagagcctcactctgttgcccaggctggagtgcagtggtgcaatctcggctcactgcaacctctgcctcttgggttcaagcgattctcctgcctcagcctcctgagtagctcagattacaggtgcgcaccaccatgcccagctaattttcttgtatttttagtagagatggggtttcaccatgttggccaagatggcctcaatctcctgatctcgtgatccacctgccttggcctcccaaagtgctgggattacaggtgtgagctactgtgcccggccttatttatttatttttgagacagagcctcactctgttgcccaggctggggtgcagtggtgcaatctcagctcgctgcaacctctgcctcctgagttcaagtgattctcgtgcctcagcctcctgagtagctgggtctacaggtgtgcaccactacatctggctaatttttgtatttttggtagagatggggtttcaccatgttggccaggctggtcttgaactcctgacctcatgtgatctgcctgccttggcctcccaaagtgctgggattacaggtgtgagccactgcacccagcctggatgctttattttaatgatttcctttctgtcccactacagccctgtgatttaggcttattgtgtctattttactgaggagtaagatgacttactcaaactcaggctttatttattcatttatttatttagaaacagagtctcactctgttgcccaggctggagtgcagtgggacgatctcggctcactgcaacctccacctcccgggttcaaccaattctctgcctagtctcccgagtagctgggattttaggcgcccgccaccatgcccggctaatttttgtatttttagtagagatggggtttcaccatcttgcccaggctggtcttgaactcctgacttgtgatccacccacttcagcctcccaaagtgttgagattacaggcgtgagccaccatgcccagccttttttttttttttaaatgttcaaatgggaaccacttggacttggtcctctcactctccctcttctgaaggaagagcatggtcatcaacggggaatggcagttgcagcaaacaactccaggagctggcttctcgttctggagagcaccctgtgcctcctctgcctggtttcctgtgctttacacatccagagaagcttctgtagtaatgaaccatagacacgatgcctcaaagtgtcatcttcaaactcgctctgaattgaaagtataatcttcagccagctgtggtggctcacgtctgtaatcccagcactttgggaggcagaggcgggcagattgcttgagcccaggagtctgagaccagccagggaaacatggcaaaaccctgtctctactaaaaatataacaatgagcctggcatggtggctcacaattgtagtcccagctacttgggaggctgaaatgggaggctcacttcaacctggcaggttgaggctacagtgagctgagattgcaccactggactctggcctggaggacagagtcagaccctgtctcaaaaaaagtataatcttcaaactcaagctcttcattggggatggggctgaaatctgagtccagttctggccgtcacaccagtgcgactcccacacacttgctggtgtcctgttgccatggagacctcttcactttggaaccatccctgacatctccctctccaattgaagcccaaagcctgggcccctcaggggctgtcctgtgtggatcttgatctccgagtactcggtggtgctgggggcctcctggtccgcaggctcccagagcctcaggccctggaagctgagggaggcatagtggagctcctgctcttcccccttccccggggtgtaggtggctgcacctgggggcgggtggtcttgggagctgcctgccgagcattcatgctggtgaccctgaatgcaggggagaaagggggtcaaattagggtcatgggggctaagcgagagcaaggaggatgcacaagaggatctggaaattgagtatttcctgtttcacctactcattccacaaaggtcagctgggccctcattcattcactcattcattcattcactcattcagcaaatatttgagaacaataacatctagctcttggtaattcactgccagactcataaaatcctcaccacaatccagactcataaaatcctcaccacaatccactggggagacactattgtctccatgatcagatggagaaatgaaggctgagtaaataccccaaacccgcacatctaagtagcggtcaggccaggattcacgtccaggtttctctgactccagtgcccgctgccttatggaacagctcccctgtgccagcccctggatattcccgggggaactagggagacaccacccctgatctcaggcagcttgcagtatggaagaagaagtagacacattaaagctatagtcaatgaagttactatctaattgcaaattataagtggatgcccaggaaggaggaggtgtgagaaagacagggatttgctcggacctggactgacctcaaagaccttggaagatctactcggacacaattgtgaaactgagctaggagctcaagaaagaaaggttactggaagtaaaggattccccttgcccagagaaagcttcaaccgtttgtgcccaggtgctgggaaggaacctctaatgtagggccttggaatatcctgctggtaggagcatccctgttgacctgggaccacaagccaggccacatagtttacgccagcactgggacttacggcggggcctacgtagcatcagtttggctctgcaggggctgaggaactgaagtcagtggcaagtcccccatgcctgcgtgacccacccccagtgaaccctggacccaggtttggtggagcttcccaggtgagcggtgccctgatgctccgtgcatctgtcacacttccttgctgggagaattgggtgctgtccccatggctcccctgggaaaggccaccggaagctgtgggtttggtatctcctggacctgccctgagcacctcttcctgtccatgattttcatctgtatcggtcactataaaccatcaccacgaggatcacagctctcagtgagtcctgcgagtcctagggggttatccaacctcagagtggtcgtggggaccccacaactgtggttggtgtcagaagtgaggatggggacccttagctttgtagtagacaatagtcatctgaggaaaggactctctggcatcctgtgttgaggaggagagataggagggagggcaaaggagtcggggatgcaggaggaaatgaggagtgggaggtggagggtccactggatctgagcacaggcagagtatggacaggcctggggggcccttggttctgggaggggatgtagggagcagtggggagggtgcctcccagatcatgggacttgggactgcattgatggggacccaggagcaaaaccctatttggggcacaatgattctgcaagtcaccaagaggactacccatggccatcaaggaaaggggaacaggcagggccccagcagacagaggctgggctctcacctgggagatgggtcccagggtggagggcacgtcctgctcagctgctgccctcttgcgagcttccttcctgcagatcttcaccctgagggaggaggcagtgcccttcagcctccaggctggtccagagcctggggaaactgctacccacatggcttagcagaggctggaaggctgcagagcccagtggggtggggacatatccacggggtgacttccatagtgagaactggggaccctcatagatggcccagatcagggctctggagcagacccctgctctgatcctcttgcccaaggcctagttctcacacccactgccccatctagattcctgcagctgggactgtctgggattctagaaccctcacccttcccacaccctgcattgcctgccctccgatgcttacctgaagacgacaaggcaggaacagaaagcgagcagggcagcgacgccagctcccagggcagcccccaggccaagtcctcccccatgctccagcttccctgcatgggagcagggtttggggtggtgccctcctggccctgagaccctcctgccccttcctcccacagacctagagctctcggattcttcatccccaactgaggcagaaatttaaaaataaatatgcattcattcactccaagaaaagtaacaggcaaggaaagggttaaaaaaagaacaacttttcctctgcttagcaaggctcacttcaaggacagttataagataatactgtttaaaaagccaaggccaaaggaataggctccagacacacccccttccagagcaaggttgaaggaaaacaagaaagaaaaacaaattcctttactgttactcctttccctggcttcttaagcataactatgttttacaaatgtctgtatttagccagttctttttttttccttttgatacagctacaaggccaccagctatgcaaggccacaagttatgctatactataaattatgtcacctatcctaaaattaactgcctctgttttacttttgtaagtctgctcataaaaacctcgctctgtctttgtttcatgctcagctttttagatgcgagtccactgagccggtttgcacctaaaataaacaatcctcctgttctccgtatcggtctcaccagtcctcagtttcccgcagcatttttggcgaccacgaagggaccagagacggtaggtttactgcctcctttgcctctgggggctggagccccgggcctcaggagacctgtgaccccaggtgccactgggtgaacttcagcctggaggagaaatcagctctcccctgagccggcgcccctacccagcagcacaacaaaacctgaaaggagctacagaatgatttcagaaacagtgtacgtcaggaaccacagtaaccttttggggaccaaggcaggacccatcccatagggatggaaggggaggctgatcacttcttgcggggtgcctaacagtccgacccagaggggttgggggcagcgagagtggctcgtcgatttggatgaaactcacaccccaaccatcacaggatgtgagaatggtttgctaagtcgattaggaaaaggaaactggaggtggcgagagtggcttaccaccctaattaggaacttaggaactgggagtggggaagtgtgtaacagtgtgtaaatgaagaagccttattaggctgatcagccacaaaatgggaagtcacaattctcttagtgtggactgggtgctccgagcaaagtgtggggccaactaagactagtggtgatctgcgtatggctaataggagctgccctacagctcagagttgtagcaggaataaggaactctccaaagccaagtagcttctgaaaactcccgtaataggagatggtatagttggccgaaactagaggaagagtgagtgtgctgggccgtaaaggaaggaatagaaggaaagtccatcaaaacttactccattgaagtgcatgttacaaaactttaagaaaggttttgcaggggattataaagttaagctaaccccccaaaggttgagaactctctttgaattagaatgactttcttttgatgttggatggctgaccgaagaaactgtagactaggaaacaattgggcatgtattaaagatggtgataggggtctgaggacagcctgagtatcccgatcaatttccttatattgattcatggttaaatacagcacagacaagactaacctggatcaagccctgtttagcagcttattgcaaaacacttgtagcccgagccaaaaataaaagtaagagcagcttcaccgactgacacgaagttaaaagaaaaaccccagaaagagcaagagaagccagttttgcaacagctgccagaggaaacagaaattcctcctccatatgtcccagcctacccccctttactgaggccaacagccctccaggaaccaaattcaggagctagcatgccctgagtctgaccccgaagggaaggactggagcctcaaaaggccagggaaggaagtcaaaatagtcaagcaggctgtctcagatctggccgtgcttgagctatgcaaatgcctgctcgagctatgcaaatgcctgtcagggagatgtgaggacccacttattgtaataaccaaggccaggttcggaggtggggggcaacgcaccttcatctatcagccctttctgactactgagctactgatctactgaactggaaacaccatactccctcctacatggagaagcctcaagctcttatagatctgacgcaatccgtctttctgacacacagtccaacctggccagattgcaggcagcttttcctaacgttatttaacactaaaaagcgcaggagagtaacataggcagctctcccctggctaaaaccccatgcaccagcagatgcagtgaatgctcaggcatacactcaaggtcagttctcataccaagatcccaactggaacccagaggatgcaactcagcttcagcatttgcaaaggtaccaagagacacttctgcaagggataaaagctggtggaaagaaagcaattaatatacgaaaaatttcaaaagtgcttcagagagctgacgagagcccaagtcagttttataaaaaactttgtgaagcattccggccttacaccctatttgaccctgaggctgctgaaaatcagcgcatggtaaacacagcatttgtagggcaagcccagggtgacgtcaagcggcagctgcaggcatgaatgccacccagcttataaaagtgaccaccaagatgtacatgaaccatgaccagagaacaaaacgggaaagagcgaaagcaacaagcgaggcaccaagcagctaggcacaccaagggtttagtccctctcctcagcctggctctatctggaaaaagagcggggcggggactggccccagaaaaaaagccaaaaaaaaaaaaaaaaagaaaggcataattcttacaacttgcggcaggcatctaccaagcctctgggcctataacggcccaggggtggactacggctgtgcagatcctacctagcccaaaaaagtaagtgtgaaaaaggaaaaaagaaaaatcagaaagaaacagtaaagatagatggcagtgcgtgcgtgcacaggggcggggcccacgccgtagcccagtcccactggccagctgtaggagcaggataactcaggaaggaaaaaggaagcagaacataggcttaaaaaaaaaggccaatctgttggcagcagccctcataaaaagaaaaattagcaggccgggcatggcggctcacacctgtaatcccagcactttgggaggccgaggtggacagatcacagggtcaggagattgagaccatcctggctaacactgtgaaaccctgtctctagtaaaaatacaaaaaaattagccgggcttggtggcgggcgcctgtagtcccagctactcgggaggctgaggcaggagaatggcgtgaacctgggagttggagcttgcagtgagcagagatggcgccactgcactccagccagggcaacagagcgagactccgtctcaaaaaaaaaaaaaaaaagaacttgtacttatggccgggcgcagtggctcacacctgtaatcctgttaccagagcccactcctttagcagaaaacctgtttgctcggctgcctaaaaacattgtcggcagcctaggcatttcctcatactatgtttgcggagggactaacacggaagaccaatggccttggaaagcaaaaaagttaatgccacaaaataatttaactgactcttctcccgaaccgacgcccacaagttcaagcgtctggctcttaaaaacttctattatcaggaaatactgtgttgctcgctggggaaaagtttttacaaacccagtaaaagaactaaactgcttaggacagcaatatgacgataaaacactaagaaacactttgtggcggggcaaagatgaatgcaaatgacctcatccaaatccgttccctgtttctcttctttaaatcacacctactatcagccgaaagctccaaatacttggcaagcacctcctagtctttgttggatctgtaggccatgggcatatcaacagttgccagctaaatggacaggggcctgtgtgcttgaaacaattagaccgtctttcttcctattcccactgcaacagggagaaactttaaggtatcctgtctataataaagttaaaaaaaatgcaaacacacacacaaaaataaaaattaaaaaaattgaaaagacacaaattaaccccctgaaaaaataattcaatagtataggccagctacctgggcacaaaatgggtcatggggataccacactcctatttacatgcttaaccgcatcataaggttgcaggcagtacttgaaatcatcactaataaaacagcaaatgcattagatttactggcccagcaacccacaaaaatgaagaatgttatctatcagaacaggttagctttggactactcctagcccagaaaaaaaaaaatgtaaaaagttcaatctaactaactgctgcctaaaaatcgctgacaatgaaaaggcaattataaaaataactgcaaaaataaaaaaattagcccatgttccagttcaaacttggaaagggtggtctccagattctctctttaaggactggttttcattttgcagagggttcaagactttaataaaagtggttctggccatactaggaagttgccgaatactcccttgtctcttagctctccttgttggaagcattcaatcaactataaaggcaatagcagctaggcaaactaccactcagctaacggctctgcataaatatcaacctttgtctaaagaaaaaaagtgtctcttcatgcagaattaagtaatagtaatgccttctattaaacttcttttataaaaaacatcaaaagggggaaactgaggcaaaaatttaaaaataaatatgcattcattcactcccaaaaaagtaacaggcaaggcaagggttaaaaaaaaaacaaaaaaaacccaagtctttctatgcctagcaagctcacttcaaggacaggtataaaataacactgtttaaaaagccaaggccaaaggaatgggctccagacacaccccttccagagcaaggttaaagaaaaaaaaaaaaagacaaattcttttactgttactcctttccctggcttcttaagcacaattatgtttcacaaatgtctgtatttaaccagttcttgtttttcttttgacacagctacaaggccacaagttatgcactatataattaaccgcttttgttttacttttgtaagtccgcttataaacacactgctttagccgggcgcggtggcacacgcctgtaatcccagcactttgggaggtccaggtgcgtgaatcacaaggtcaggagttcgagaccagcctggccaacatagtgaaactaaaaatacaaaaaaattagctgggcgtggtggcgcatgcctgtaatcccagctactcaggtggctgaggcaggagaattgcttgaatccgggaggcagaggttgcagtgagccgagatcgagccactgcactccagccttgctgacagagcgagactccatctcaaaaaaaaaaccaaaaaacaaaaaaaaccccttctttgtctttatttaatgctcagcttttgaaatgtaaatccactaagctggaacttaccttaaataaacaatcctcctgttctccatattgctctctccgttcctcagtttcccgcaacaactaccagccacagagcagggactttgtccccatcccttcccaccacgcccacaccctctccccacaaccttgaaccttcatctttctaggatcctgtctcctttctccctgaacctcagccccccacagtcccctcacctggtagcagctggaagacagagccactctgggccccgtggacgttccaggccttacagcggagcctgaggccggagctgagccctccatggaggctcagggagctgttggcccagggcccggctgagctgggggtgacctcgaaggagccctgactgctgttcccctccagcagctcctccccaagccaccagcgcagagagggggccgggctggcctgggaggagcagctgcagtgcagaccctcagcctcccaggagcaggaggggcccagcagctgtggagggtctgtggggagggaggacaggactcagcaggggccccttcctgggacccaggtgtcccctttcccccactcacagtgcacggagaggctgagagagacgtgctgggagcccagagggtgctgagcgtggcaggtgaactctccttcgtgctccatttgaatgggtggcagctccaggaccccggggtctgagggctgggaggggcccacggtctgtccccaccgggtccagctcagcctggctggggggctgctgtgggtgacacagaccaggcgcaggctttggccctccaggaccgggagggatgtgccgttcccgaggttttccaggactagggaaggaagaggcagaatcgacgtgcagctcagggctcagggaccctcctgtgtggggaccctccagactcctgggcccccagtttggcactgagaggccctggctcctctgtctcctttcctacctgtcctgtttgcttgggaaaccatcactctcaggttctctggaggatctgaaatggagacaggggaccggctctagacagaccaggggcttccctctgggtaaagggaactatcctggacactgaggtgggggaagtgggtgggatagaagggcagggcagaatcacccactgagtcccagacacaaactgcatgagggtctacacaggtaagaaggtcagtccccgaggcctggggttcaagaccccctcagctctgggaccctgagcccagcccctgtatccctctgccctcccaatggactccaggcccctgctaggcacactcacactgcacagagaggtccagggcttgctgctgggagccaagcctgttctccgctcggcaggtgtagcgccctgaatccccggcccttaccccacgcagctccagccccagggttctggggccccaggggtgggacgaggagaggactctgtcctgcaggacccagctcagcgtggcagggggctggctgtcagcagcacagaggagccgcaggaactggcctttctgaacttccagatatatgacgtttccctggagttccagggctgaagacagggaaagagagagggtgggggtggagagagagaatgggtgggagggggggctgcaaagaggaccacatcccctcacccccctgaagccttttcatccctaaagaggactggcccagccccagcccgaaggccctcagtacctgacgtgttgtcatgtgaaatgctgataataaggtctttgggggcatctgcaacaagattgtgagctggcttcagggagggacaatttgttcctcacacctggaaaaaactccctcagggaaaagaaagtgggaacatcccaggatggacaagtgacaaccagctccagggctcacacatgtggacagaggatcagacgccattcccatccccctcccagggctgagccggcatcctgggaccccacagcttcctctccctggatgctcctgagctgggagccactcactgtcccgctgggctcctccacctccccacccaccggggctgtctgcacgccccaccctcccaggccacactcacaggccacacggagtcggacggtcctctgtgcgctcacaccctttctggagaagtccacatggcaggtgaggtcggtgtcgtggtcctgggggctgggcgtgaagctgagcactgagaagtgggaggtgcttggtctggttcttctaggggagagggcagcccccgtccaggagaaagaaggggctggacatttcttgaaagcccagttaaacacacagatgaccgtcaccggctgcccgggctccagggtctcggggatgtagacatcaggcttcttagtcagggctgggacagagaccgggtgggagattcttgtgctgcaggggtccctgagagccctctctgctcagcccatagcctgtccccagggtccctccccagtgtgacaggcaggggttcccaccccattccatacctgttacttttagaaagaacgcattgctcaggaaactatgtctcacacggcttcctctctccacccgaaagaagtaccatgcctcatcctccctctgcgcgtctctgatcaccaaggagcagctccctttgccgggatccccagtgagctggaatcggtcccgggtgctcatttccacctctcgactctggttgttagtggccacaggagcacccgtctttgggctggtccgtcctttgaaccagtagccataagcagcagtagactcgtcccagccatcccgggggtaggagaggttgcaagacacgatgacacacaggccctccggcaccggcacctgcctctgcacttgaagactgtaactgggatccttgttcagggaccctggggagatgcagaggctcagcggcagccccagcccctgcctgggacccccagccaccgacccactcacccgcccccagcacgggcagcagcaggggcagcagcagcatctctgggctctggggctgggcctgtcccgggaccatctggcttctgggccggcctggctgggaaggaaactcctccagcaggaagcctggtggaggggcagtgaccatccacagaggaggagcctcgggaaccgctatgtcctgaaagctcgcttcccaacttctcctttcacaggggaagcagcagggcagagggcatgaggaccagccccaaaccaggaaggagccaccctggccagcctcggaggtgggcagtgctaggaggggactgtcaggggacacaggtgagtcacggctgcaggtgaggtgatggatgcagagtctcattcattcattcattctccagggggccatgagacactggaagagtctacaagaacacagtgatttatggtgggggctttgcaccacgtattattgctgtatctccacagagggtaaaaactaggtcagccacacaggcagtcagctgcatctacgtgaccaacccccagtaaaaactctgaatgccgaggctcaggtgagcttccctgggtggcaatacttgctgtatgttgtcactcatctttgcttcaagcattaagcgctttctgtatgacttcactgggaaaggacaactggaatcccacatatggtctcttctggatcctgtcctatgaacctttctcctttgttgatttttatttatttatttttattttattattattatttttttgagatggagtctcgctctgttccccaggctacagtgcagtggtgggatctcagctcactgcaagctccacctcccgggttcacaccattctcctgcctcagcctcctgagtagctgggactacaggcgtccaccccaacgcccggctaatttttttcttgtatttttagtagagacagggttttagcgtgttagccaggatggtctcgatctcctgaccttgtgatccgcccaccttggcctcccaaagtgctgggattacaggcataagccactgcgcctggccattttatttttatttttgagacagtctcactctgtcacccaggctggagggcagtggtgcaatcttggctcactgcaacctccgcctcccaaggtcaagtgattctgctgcctcagcctcccgagtagctgggactacaggcacccacccaccaccatgcccggataattttttgtatttttagtagagatggggtttcatcatgttgagcagcctagtctcgaactcctgacctcaggtgatctgcctgcctcagcctcccaaaatgctggcattgtaggcgtgagccactgtgtctggcttgttgatttttttttttttagatgaagttttgctcttgttgcccaggctggagcacaatggcatgatctcggctcactaaaacctccacctctcaggttcaagcgattctcctgcctcagccccctgagtagctgggattactggtgcccaccaccatgcccagctaattttttgtatatttagtagagatggggtttcaccatgttgactaggctgatcttgaacttctgacctcaggtgatccacctgcctcggagtcccaacatcctgggattacaggcgtgagccactgcgcccagccctgccttgttgatttttaaaaagtatttttattaatatgtgatatttgtacatatttatggggtatatgtgatattttgtgccatgcatagaatatggtataatcaagtcagggtatttgaatatctgtcacctcaaacatttattatttctattgttgggaacatttcaaatcatcttttctagttattttgaaaaatacaatacgttattattattttttaagacagggtcactcaggctgggcactgtggctcacgcctgtaatcccagcactttgggaggccaaggcgggtggatcacaaggtcaggagatcaagaccatcctggctaacacggtgaaaccccatctctattaaaaatacaaaaaattagctgggcatggtggcacgtgcctacagtcccagctactcaggaggctgaggtgggagaatggcgtgaacccgggaggtggagcttgcagtgagctgagattgcaccactgcactccagcctgggcaacagagagagactccatctcaaaaaaaaagaaaaaaaagaaaaaaaagacagggtctgtctgtcacccaggctggagtgcagtggtgagatcacggctcactgcagctttgacctccccaagctcaagcaatcctcccacttcagcctcccgagcagctgggactacaggtgtgcactaccacttaatttttatactttgtttttgatagagatggagttttaccatgttgatcaggctggtctcaaactcctaggctcaagcgatctgcctgtctcagcctcccaaattgttgggattacaggcatgagccaccactacaatatgttactgttaactatagtcaccctactctgctattaaacataagaactattccttctatataaccgtatatttgttagacagacctcttcattccccacctactcacccatgcatccttctagggttccgataactattattctactctctgcctccatgagatcatagtccatgatctctgtatgcctttatgtatccatagcttagctcccacttaaaagtgagaacataatggcatttgatttttcattcctgagttatttcacttagaaatatggcctccagctctgtccgagttgctgcaaaagatattatttcattctttttttatggctgagtaatattccatgacaatggtatacataccgctgcctagaccaatgtcctgaagagtttttcctaggttatcttctagaattttttggtttcaggacttagatttaagtctttgatccatattgagttgaatttttttttttttttttgagacagagtctcactctgtcgcccaggctggagtgcagtagcatgacctcggctcactgcaacctccacctgccaggttcaagcaattctcctgcctcagcctcccgagtagctgggactacaggtgcccgccaccatgcctggcttgttttttgtatttttagtagagatgacgtttcaccatgctggtcaggctggtcttgaactcctgacctcgtgatcctcccgccccggcctcccaaagtgttgggattacagtcgtgacccactgcgcctggcctaatttttgtatttttaatagagatggattttcaccatgttggccaggctggtctcgaactccttacctcaagtgatccacctaccctggcctcccaaggtgctgggattacaggcatgagccactgcgcctggccaaggattgatttttgatgttttttttttttgagacagagtcttgcatctcgctctttcatccaggctggagtgcagtggcacgatcttggctcactgcaacctctgcctcccaggtagctgggatgacagatgtgtgccaccaggcctggctaatttttgtatttttagtagagacgaggttttaccatgttggccaggctggtctcggactcctgacctcaagtaatctgcccacctcaacctcccaaagtgctgggattacaggcatgagccaccacatccagcctgattttaatgtttatagtttattggcgcttaattcaggtcttggtgctttcagggatgaaggttctgtatgagttccttggttgtagagagtccttgtgcgctggcttctcagttgctggctgcagtggcaatgtgctcagtaagatggtgatcaagttcatcatctcctgtggggttggaatggcagaggtcttttgaagcttaccttgttccactgtggtgtgcacttttaaattaatttatttttttccccagtattttattcactgggttgaatcattaaggcttcaggttagtggggacgtgtctctgggtagaaaacagttgtggctggccggtgcggtggctcacgcctgtaatcccagcactttgggaggctgaggcgggtggatcacgaggtcaggagatcgagaccatcctggctaacacagtgaaaccctgtctctactaaaaatacaaaaaaattagccaggcgtggcggcgggcacctgtaatcccagctactcgggaggctgaggcaggagaatggcgtgaacccaggaggcggagcttgcagtgagccgagatcgtgccactgcactccagcctgagtgacagagcaagactccgtctcaaaaaaaaaacaaaaaaaagacaaagaaaaaaaagaggccgggtgtggtggctcacgcctgtaattccagcactttgggaggccaaggcgggtggatcgtgaagtcaggaggtcaagaccatcctggccaacacggtgaaaccctgtctctactaaaaatacaaaaaactagccaggcgtggtggcgggcgcctgtagttccagctacttgggaggctgaggcaggagaatggcatgaacccgggaggcggaacttggagtgagccaagatcacgccactgcactccagcctgggagacagagcgagactctgtctcaaaaaaaaaaaaaaaaaacaaaagaaaagaaaagagttgtggctaaagcactgggtaaatgcagtacccaatggtgagccaaggcccccgccttgacagaggtggctgggggagctcttagcaacatgcgctgaggtttgcttttgcttttttgtttttgacaggatttcagtctatcacccagggtggagtacagtggtgtgatcacagatcgctgcagccttgacctccctggctcaagtgctcctcttgcctcagtctcccaggtacctgggaccacaggcacatgacaccgtgcctggtcattgttaatttttgtagagttggggtttccctatgttgcccaggctagtctctaactcctggtctcaagcgattctccaacctcggcctctcaaaatgctgagatgacagccgcaagccaccatgcctggccatttccttccttgtactaattttggtttattcttgcttttctggttccttggggtccatttttttttttttttttctgagatgcagtttcactctgttgcccaggctggagtgcagtggcacagtttcagctaactgcaacctccacctcctgggttcaagcgattctcctgcttcagcctcctgagtagctgggattacaggtgtgccaccatacccagctaatttttgtatgtttagtagagatggggtttcaccatgttgtccaggctggtcttgaacccctgacctcaggtgatccacccaccttggcctcccaaagtgccaggattacaggcgtgagccactgcgcccggccaggggtccactgttatgttgtgtatttgaattcttctatctttttttttgaaagaggcatttgttgttataaacttcactcctggcacagcttttgcagtatctcataggttttggtaggctgtatttccatcttcatttcaataatttttttttttttaagacagagtctcactcttgtcatccaggctagattgcaatggcaccatctcagctcactgcaacctccgcctcccaggttaaagtgattctcctgcctcagcctcctgagtagctgggattacaggtacatgccaccatgcccggcaaatttttttttttttttgtatttttagtagagacagggtttcaccatgttggtcaggctagtctccaatgcctgacctcaggtgatccaccttggcctcccaaagtgctgggattacaggcatgagccaccgctcccggccgcaagaagcgtcttgatgttctttttaatttcttccttgacccagtggtcattcaggagcatgctgtttaatttccatatatttgtacatcttccaaagttcctcttattaatcatttctagtttcacttccattgtggtctgagaagatgtttaatatgatttcaatttctataaatatgttagatttctttcatagcctcacatatggtgtatcctggagaatgtttcatgtgccaaagagaagactgcgttcttcagctgtgggataagatgttctgcaaacatctcttaggtcccttgggtctaaaatgcagtttaaatccaaagtttctttgctaattttctgtccagatgatctgtctaatgctgagagtgttcaatgtggtgttcaagtctccaactactattgtattggagtctgtctctccccttatgtgtgctccagtgtgaggtgcatataaatttagttacgtaaagttatatcttcttgctgaattgacccttttatcattacgcaatgacttaaagtctgtttttttttttttaagtctctttttttttttttttttgagacggagtcttgctctgttgcccaggctggagtgcagtggcgcgatctcggctcactgcaagttctgcctcccaggttcacgccatcctcctgcctcagcctcctgagtagctgggactacaggtgcctgccaccacgcccagctaattttttgtatttttagtagagatgggatctcaccgtgttagccaggatggtcttgatctcctgacctcgtgatccacccgcctcggcctcccaaagtgctgggattatagacgtgagccaccgcacctggccttttaagtctgttttatctggagtaagtataactactcctgcttgtcttttttggtttctgtttgcatggaatatttttttcaatctctttgttttcagtgtatatgtctttccaagtgagtgactttcttatatgtagcataaagttgggttatgtttttgtaaatccatttagcaaaacatcaaattgtatccataaacatatataattattattatttgctaattaaaaataatataaattgtagtaaaatacccataacacaaacctactactttaaccactttattttttatttatttattttttttgagatggagtctcactctcttgctcaggctggagtgcagtgacggatctcggctcactgcaacctctgcctcccggatttaagcaattctcatgtctcagtctcctgagtggctgggactacaagtgagcgccaccatgccctgctaatttttgtatttttagtagagacggggtttcgccatgttggctaggctggtctcgaactcctgacctcaggtgatccacccgcctcagcctcccaaagtgctgggattacaggcatgagccactgcatctggcctactttcatcattttaaagtgcacaattagctgggcatggtggtgcatgcctgtaatccctgctactcgggaggctgaggcacgagaactgcttgaaactgggaggcagaggttgcagtgagccgagattgcgccactgcactcagcctgggtgacaaagtgagactcaaaaaaaaaaaaaagtgtacatttcattggcactaagtacattcacattcttgtgcaaccatcagctccatctagttgcagaacttttccatcattgaaaaaagaaaccaagtacccattaaacagtcacttcccattcttccctccccccaggcccccaaaatgacaaatctacttcctgtcactacatttgcctcttctggtcatatcagatgaacagaatcatgcaatattgtctggtttctttcacttagtataatgttgtcaggaccatctatgctgtggcaggtgtcacaatgtaattcttttttaggggtgaataatactccattaaatgaataaaccacattttgttcatggagttttaaatttgctagttaatgtccaaatcctcagccttggggaatcgggaggtgctggggcccctgcccttgagtctgcacaacccagacccccctctatgcccaggtggtaattggggctgggctgagccacaaactagtctgggcatcagggtggggaggtgacagagctgggaccctgtgatgtaaggtccaagttccccagtgggggctccatgaaccaattagacctcatttacaaaacacagatcaaaagataaattattaagaatgtccagggggcaacctcagagcactaaaccccaagcatgaggccccctgagctcactggggtcttatgtaattgcccccttctccctgtggagctgggagcctggtgtaagctgcagagacggccccgcaacaggcaggggagctcagtgcctttggggagcccggggaccctgagttgacataagtggaggtgaggatcctgtgggcagggattggatggtcatgtcttctttgcctccccccactgcatggagtagattttgcctggagaatgaatgaatgaatgaatgggactctgcatccatcacttcacctgcagccatgactcacctgtgtcccctgacagtcccctcctagcactgcccacctccgaggctggccagggtggctccttcctggtttggggctggtcctcatgccctctgccctgctgcttcccctgtgaaaggagaagttgggaggcgagctttcaggacattgcggttcccgaggctcctcctctgtggatggtcactgcccctccaccaggcttcctgctggaggagtttccttcccagccaggccggcccagaagccagatggtcccgggacaggcccagccccagagcccagagatgctgctgctgcccctgctgctgcccgtgctgggggcgggtgagtgggtcggtggctgggggtcccaggcaggggctggggctgccgctgagcctctgcatctccccagggtccctgaacaaggatcccagttacagtcttcaagtgcagaggcaggtgccggtgccggagggcctgtgtgtcatcgtgtcttgcaacctctcctacccccgggatggctgggacgagtctactgctgcttatggctactggttcaaaggatggaccagcccaaagacgggtgctcctgtggccactaacaaccagagtcgagaggtggaaatgagcacccgggaccgattccagctcactggggatcccggcaaagggagctgctccttggtgatcagagacgcgcagagggaggatgaggcatggtacttctttcgggtggagagaggaagccgtgtgagacatagtttcgtgaacaatttgttctaaaagtaacaggtatggaatggggtgggaacccctgcctgtcacactggggagggaccctggggacaggctatgggctgagcagagagggctttcagggacccctgcagcacaagaattccccaccccggtctctgccccagccctgactcagaagcctgatgtctacatccccgagaccctggagcccgggcagccggtgacggtcatctgtgtgtttaactgggctttcaagaaatgtccagccccttctttctcctggacgggggctgccctctcccctagaagaaccagaccaagcacctcccacttctcagtgctcagcttcacgcccagcccccaggaccacgacaccgacctcacctgccatgtggacttctccagaaagggtgtgagcgcacagaggaccgtccgactccgtgtggcctgtgagtgtggcctgggagggtggggcgtgcagacagccccggtgggtggggaggtggaggagcccagcaggacagtgagtggctcccagctcaggagcatccagggagaggaagctgtggggtcccaggatgccggctcagccctgggagggggatgggaatggcgtctgatcctctgtccacatgtgtgagccctggagctggttgtcacttgtccatcctgggatgttcccactttcttttccctgagggagttttttccaggtgtgaggaacaaattgtccctccctgaagccagctcacaatcttgttgcagatgcccccaaagaccttattatcagcatttcacatgacaacacgtcaggtactgagggccttcgggctggggctgggccagtcctctttagggatgaaaaggcttcaggggggtgaggggatgtggtcctctttgcagccccccctcccacccattctctctctccacccccaccctctctctttccctgtcttcagccctggaactccagggaaacgtcatatatctggaagttcagaaaggccagttcctgcggctcctctgtgctgctgacagccagccccctgccacgctgagctgggtcctgcaggacagagtcctctcctcgtcccacccctggggccccagaaccctggggctggagctgcgtggggtaagggccggggattcagggcgctacacctgccgagcggagaacaggcttggctcccagcagcgagccctggacctctctgtgcagtgtgagtgtgcctagcaggggcctggagtccattgggagggcagagggatacaggggctgggctcagtgtcccagagctgagggggtcttgaaccccaggcctcggggactgaccttcttacctgtgtagaccctcatgcagtttgtgtctgggactcagtgggtgattctgccctgcccttctatcccacccacttcccccacctcagtctccaggacgcttccctttgcccagagggaagtccctggtccgtctagagccggtcccctgtctccatttcagatcctccagagaacctgagagtgatggtttcccaagcaaacaggacaggtaggaaaggagacagaggagccagggcctctcagtgccaaattgggggcccaggtgtctggagggtccccatgcaggcgggtccctgagccctgagctgcacgtcgattctgcctcttccttccctagtcctggaaaacctgaggaacggcacatccctccgggtcctggagggccaaagcctgcgtctggtctgtgtcacacacagcagccccccagccaggctgagctggacccggtggggacagaccgtgggcccctcccagccctcagaccctggggtcctggagctgcctcgggttcaaatggagcacgaaggagagttcacctgccacgctcggcacccgctgggctcccagcgcgtctctctcagcttctccgtgcactgtgagtggggaaaggggacacctgggtcccaggaaggggcccctgctgagtcctgtcctccctcccacagagcccccccagctgctgggaccctcctgctcctgggaggctgagggtctgcactgcagctgctcctcccaaggcagcccggccccgtctctgccctggtggattggtggggagctgcggagggaaacagcagccaggactacttcaaggtcacccccagctcagccgggccctgggccaacagctccctgatcctccaagggggggcttggctccaacctcaggctcacctttgaggcccagaacgtccatggggcccagagctctctgattcctggcggacagtcagggtatagggtggggaggcctgggctcaccaggtcctgcatccagggatgtaggaagggcctggagaaccaagttgcaataagagaggaaggattcggaagtgtggtttagaaggtgaatgggccttatcccacttttccaggcaaatcagggcccatgacgggggtggttctggtggctgttggggaggtggctatgaagatcctgcttctctgcctctgcctcatcctcctcaggtgagccctgccccagggaccaaggggaggggcggagagggcaaaggatacaccgctgaatcccagaatctcaatcctgggggtacttggacagttaaagaggcctgtggccaggcagaggctgagttgatcgtgatgattccacacgggccagtgttgtcagtccccaactctggaccaatgtccaggctggggaggttcctgcttgtatcagggaggtcctgggggctaggcctgctctctctgcctcagtcccctccaaccccttagcagggcacagggaggtgagtctgctgccctcttcacccccatccagccacactcacaggccctggtctcttcacccagagtgaggtcttgcaggaggaaggcagcaagggcagcattgggcatggaggctgcagacgctgtcacggactaatctccaggtgagtgtcgtgggcctcttaccctccaacatcccgctggacacctccccctcgatggccccaaggactgctccactcaacttggccataactgactcatcacctccctttccaagcccacttctcttgttgagagccccatccctctgatgacatggtagccccatctctaacgtcagaacccgggtgtgggtgtccaccttgacctccctccctcctccagatcccaaaaatcactagcacttgtccctcctcctaagtacaggtcaccttggagcccttttctccatcctggccccggtcatgcctgggcctcacctcttccctggtcgctgaacccacctcacctcttgcctccatctctcccaacagactccagactgcttccagatgcctcctcatccagttcctccacagtctgagcggccgtgtttcctctgcaggctttgcatggtctgtcccctgctggactctcctgatccctcctttccctgtcacccaacatctccccaaaccctccgggccaaggactctgcggctcttgacactttgcacgtgtagtttcttctcctgaaacacccttccctcctgccaaaccacgtctggaccctccttcaggttcactttttttttttttttttgagacacagtctcactttgtcacccaggctggagtgcagtggcgcgatctcggctcactgcaacctctgtctcccaggttcaagcgattctcatgtctcagcctcctgagtagctgggattataggcgcccgccaccacgcctggctcatttttgtatttttggtagagacagggtttcaccatgtcggccaggctggtcttgaactcccgacttcaggtgatccgccagcctcggcctcccaaagtggtggggttacatgtgtgagccaccgtgcccagccagctgtgtcttctttttgcaggatttacttacaaaattccttgcagctgcagtctgcgttccacccacatcctaatatggtgtttgcggtggtcacatccaacttccttcctcctccatccatggaacgtgcattagggaggaaccacacgcaccacgtgcaagatgagccagttccctgaacggccggccacggcgttaaccgcgctgctctgggctctgcacgtctcatctgctgaggcgcattactgcatctttcatgcagaacttgctttccatgcctcacatctccacatgtgtggggatatgtcctgagaaatgcacggttaggtgattctgtcgtgtgagcatccttgaatgtgcttacacagtcataaatggtacagcctaccacacgccgaggctatacggtatagcccattgctcctagactatacacctgcacggcatgttcctgtagtgaaagctgtaggcaattataacgcaatggataggttaaagacagagttttagtaaaaatatggcataataggccaggcgtggtggctcatgcctgtaatcccagcactttgggaggccaaggcaggcagatcacaaggtcaggagtttgagaccagcctggccaatatggtgaaacccagtctctactaaaaatacaaaaattagccgggtgtggtggcgggcgcctgtagtcccagctactcgggaggctgaggcagaagaatcatttgaaccaggaggtggaggttgcagtgagccgagatcgcatcactgcactccagcctgggcgacagagcaagactgtctcaaaaactaaaacaaaaaaacaccaccaccaccaccaatgtctgattaaatctaagccacggttccattttggggcaaggggcagggtgtgggtgtggtggacagagaacgggctccagccaccatcagctgcacgtcctggtagcacctgagccattcccagtctcctgtgctgggagatcatcatctaatcctgatgatgacgccctcctctcagagctcgggggatgagctgccaaaacccatggaggttcaaaacccgggctctggagacagaagacactgggctcagagacatggggccactgtccaggctttccctgggcctggacctgggctccttccactgtctgagcagggtcagcctgggctggctgtgctggttcaagagatgagggaggaggacacagcggttgccaggaccctgaggcactggactgggcactgccccaaggggcagaggatggaacccggtgttgatattgtgatgctgacccgtctgctcacctgatttgggtgctgaagggcagctgacccccctaatcttttatagacttgtgaaacgaaaataaataaaagtcaagctgggaacagcttagggcaaacctgcctcccattctattcaaagccacccctctgctcactgagatagatgcatgtctgatcacctcagttgggaaaggctaatcagaaactccaaagaatgcatctgttcatctctcacccatctgtgacctggaagccccctccccacttcgagtcttcctgcctttgcttcaagttttcccgcctttccaaatggaaccaaagtacttcttacatatagtgactcatgtctcaagtctccctaaaacgtataaaactaagctgtgccccaaccacgctgaccatgtcatcaggacctcctgaggctgtgtcacggcctgtgtcctcaaccttggcaaaataaactttctaaattaactggacccgtctcaaattttcggggttcacagactcatgtgcaacaaggggtctaagcaggacaggttcgggggggtttcctattgttagcagatgtccccttctggaaaggggtgcaaacacccactttcagccaggagatggtaagcggttccctgatcccacctgcttctcctgagcagggtttatcagtacaggagagtcagggtatctgagagcacttccttccttacctggcctcagattctccacactccaaagtatgatgcatgatctgagttactcaagacaaaattcagggaggcaggtttagcttctctcttccttttttttctttagacagggtcttactctgtcgcccaggctagagtgcagtggtgcaatcatggcttgctgcagcctcgacctgctgggctcaagtaatcctcctgcttcagcctcccaagtagctgggactacaggcgtccaccaccaggcctagctgatttttgtattttttgtagagatgggtttcaccctgttgcccaggctggtctcaaactcatgggcttaagtgatcctccagttttggcctcccaaagtgctgggttacaggcatgagccacagcacctgggccccaaaagaacttttacagataactgactcctcaagctctggtaaaacaatttattaccaaagcacagaggtgtcaagggtaggaggggtcccccctgtgggccggcccaaccccatccagctttgctaggacactggctgaagggcaggccaccaagatggggaacttcacattcacgggagggaaactggggccctccgggaggctaatcaggactgatgagtatcctgaaaccagtggcaggaatgcacattccagggcttgttctagaagcttatctgtgattaaacagcaggccttgagtcacattacttcatttttttttttctgttgcacactgcaaatggaaagttctggaagacaataaaaatgctgttagtgtctcattcattcaaggaacaccctctatgccttcacttcatgccaagcaccttctaggttctggggatgtcatcttctaggtactggggatgtcatcatgaccatacgggatgaggagcccctgctgggcttaggatgaggaggaggcgggtggagactacacactaaacacacgcttccctccagatgggaacaagggctgtgtggaaaacaggtgacatgatgagcaagtgggtggggaggcagtgaggatgcctcatggaggatggggaaggcctcgggtcttgagaagcagcaggtacataaagccaggatgaggggagctttccagaactcgggatggcaggtgcaaaggttccggggtggggtccagcttggcctggtctagaatcagaggggcgggggtgtggctggtgcatcgtgcacgggggaggaagggagctcggcctcgggccaaggcaaggagctgctgtggagcacaggcaagatgaccttcaaggtgctcgaagatcactgggctccttaaatgccatctcctcgttatgttcccaaccaaggggctgagtgagtggcctccagggagcgcgtgggtgtgagacggtggagaccctgggaggttgtcaggtgtcaggttctaaatgccctttgccctgggtgaggaaggcactgtgagacacagtggcactgacgacgggaagcctgggctcgctccatcgataaacaggatgaagcctctgccctgtgccatgccagaaaagcagagatgacagagtcagacgcgaccctgccctggaggagctggctgccagcagaagactgtgacaagtgaccccgtggtcagtctcacccgggaccgaaggtttggaggaggctgctgggggagcaagggtgttggggaggaccccgagctgtctggcctggataactgggtacacggaggagctgtgtatcgagctggagaggtgggggaaagagggagattggcacaggtcatgactttactctcggcaccactggttgaggcagagagcctgctactccaccacggagaaaagagtccccacccctcaccactggcccactctgtgcgcaggtgctccacgaatcgcttgacacacacgtgtcagctcaggtttcagcctcagatgtaaggaaacgttgtgggaatgcagaagcacttgtaatccaagcgccaagaagaacgtcgctgcgccgggagacaggccgtcaaaaggagatgctgttcaagatgccctgcgactaggatctcacaatcgtggtgctgctgaccacggggccgggggattctttgtggggtggtacaggtgggcaccgtgctgcatgtcacaggatgtcaggcagcatcccggcctccactgtcccgcatcctgacaaccaagtgtctccagacactgccaaatgcccccagggtggtgccaaatcagacaaagcactgagctttggttccagccaactccgatgagagaaatgactactccggggagagaaaaggagcctggagaagctcctcttcagcacacatctctgcacccttgccaaaatttactgtgtagtctgtctttgaccttgtaaaaattcctgcacgtttacacaaagtgctgatggaagtaaagccatctagtcagcactgtcaagttgatacctccatccacagacagcgtgcgccagcagccgggctgtgcacacaggcagcactgttggtaaaataaaaatctgggaaactaagcaaacgcccagctgctggctgtgaggagtgtccgtcatccacaggaaggggtagtgcgcactatgaacgagacccgaaggcatggagcagctaccttttgtgtatgggggcgccaagggggccaggccaaaggaaagtagagactacaggtggccgggtggaaggacagagggaggcatggatgcaagaagggacagaagatggcgagagacaaacaacgtcttgatgctatttttgaggccctgaatcccgttgtgcctgaagctcccccttgtaattttctagctacaacagccaatcaatccccacttttcttaaagccaagttgagccgggtttctgctacttgccattccttgaggctgggaagttcaaggaccgtgcggaaaaacccagtgtctccctgggaagctgggccctggtatgaacgtggaacagcctctgggaagtgtctcctggagcctggggcagggctcgggtgagggcaaggggtgagaggcttaagcctcacaagctcttcccacctggattccacctagggcaccatcgggaggccaatggggtcatatggagacacacgcagatcctgcagcaaagcttctaggttgttcctcagcatggcgtagggcggcttctcctcatacgtgagggccatcaccaccttcaggtacttctgcagggtctctgtggtcaagacaacccccagcaagggagagcctgagaggcatcccccaaccccgatcctgggggtctccacccaaggatggaggggtgggggactgaggggcatgagggtctcagcaaaagtgcccattttcttgttgcctggcattgccagaggacttcaattgtttttcagttttggaaaatgtcatacgcaggcaccagtagaagggcatgaacacccaagtacccatcactcagtttcaacaaggatcacctcacagccaatcttgtttcatcaagacccctcccctggcctgcagtgttttaaagcaaatcccagctagcaatgcagtctacctgcatataaatatttagcatgtatctttaaagagggcgggccctgcttcacctccacctccaacctctggctgaccagcttaaaatcctcgaggcccaaggttcacagaggtagaactggaggggagtgtcacttgggcagctgagccataatctgaacccagggatttaaagtaattcagccgggcgcggtggctcacgcctgtaatcccagcactttgggaggcagaggcgggtggatcatgaagtcaggagatcgagaccatcctggctaacacagtgaaaccccatctctactaaaaaaaaaaaatacaaaaaattagccacacatggtggcgggtgcctgtagtcccagctatttgggaggcagaggcaggagaatggcttgaacccgggaggcagagcttgcagtgagccaagatcacgccaccgcactccagcctgggcgacagagcaagactccgtctcaaaaaaaataataaaataaattttaaaaaaataaataattaaaaaatgagccttagagagccagagggaacaagctatctgtttctgtctgtccatttctgcctccagcttggagaaaagcatcaaagctcttcaggaggggcacaaagacaacaggaaaaacaaacacccccgacaccccaacaagacagtgcaaatacccagtaacagggattggctttataagttacggtgcggacaaaccatgaccattgtgcagctgttgataaaagctgtggtgcatctataaggaagggcatgaaggatggccccagggttaagtgaaaaaagcaagaggtagaatgagatgtatgtagggtgagcttattttttgttcataaaaatggccgggcatggtggctcttgcctgtaatcccagcactttgggaggccgaggtaggtagatcagttgaggccaggggttcgagaccagcctgggcaacatgatgaaaccccgtctctactaaaaatacaaaaaactagccaggtatggtgacgcacgcctataaccccagctacttgggaggctgaggcacgagaattgcttgaacctgggaggcggagactgcagtaagctgagatcgtaccattgcactctagcctggatgtcagagctagaccctgtcttaaaaataaaaaaaaaaaattaccctgtcttcaaaaaaaagttgtgtttttgttttgtttttcagaggcactagtgaatcttttgacgattttgtctttctacaatgggtacgtattacaaatgcaatttggaaaactaaaaaaaatgaagaggtgtaaggagaagccaccccaagatggatctgagccaccaggtcctgcccgagtccccgcctgttcccgctcccttcaggacgtacctgagggcctgatccagtgaccgcagggtcccacgaagggccccggcttatcaacaaacctgaagggacagaaacacatgtgaaaggtctcttagggaaaggagagcaaccttttaaaacagaatgcctaagatatatacacagcctaagatatatacacagtcccctctgccatccagggaagttatgttcttaaagtcactgtgaacactgaatcaaccaatccactaccattgctcccaagggaaacagcactgcttcctgcaagcctctggccacacgattttccccgatcaatacaccttgttttggccgggcacagtggctcacgcctgtaatcccaacactttgggaggccgaggggggtggatcacgaggtcaggagatccgagatcatcctggctaacacggtgaaactgtccctactaaaaatataaaaaactagccgggtgtggtggcgggtgcctgtggtcccagctactcgggaggctgaggcaggagaatggcatgaatctgggaggcagagcttgcagtgagcctagattgagccactgcactccagcctgggcgacagagagagactccgtctcaaaaacaaaacaaaacaaaacaatacaccttgttttatgtatgtttctgttgaaatacatcttatgtaataagtattgttgattcattagcattgaactcttttaatctgtgatccttaagacggagaggatccctttgatgatgaggaaagatccaagatggaaataaagattttattacttacaggtcctgggggcacaccgcacacccaaaggtgacctccccacccgtcccaagcacacacacagacacacacacacacacacacgcacactggtcagggagctcgtggctgtgaggggccaatgggcggtatccaaacattttgaggagattttaactggtaggttcaaagcaagcaggctcgacttcaggaggtcatgctgtgcctgagagggggtcactgtggcatccgcacagttcagtggaatgtgggggccagcggggccgtcaagtaggctgtctgtggctgactcaaagggagggaggtggtcccccggaggcggctgcataacggagatatctgggtcaaccacacggaggaactgggaggaggtggaaaactgcaaactgctgacggtgaccgagccttgtttctggcatgacaaagtccagcttacattaaaatgaatcccaaggcaacctgaaatgataagaattccccacagactcatgaccaacagcaccgtagctcatgcctgaacaaagctgataaaacacacgaattattaaccatctcaggctttgggacatcagacagcccttcagcattatgctaggtggctgtttgattttttgtggagatggggtctcactatgttgcccatgctggtctgatcctcctgtctcggcctcccaaagtgctgggattacagatgtgagccaccacgcctggctgaggccattttaaatggcataatcactgacaaaaagcataaaaacaggaaaaaatgtatcattaactaaacagtgaaaaggacaccagcgtatatagtgtggaggctgaaatagggaggcagaatgctgtctggttccaccctaggctgggaacatgtgtgtcagatgattaaaatttttctccacactgtgtctgtaagtggccatgaaagaacagcaagaattgatttggggttacaactacttttagtgagtaagagaattcacacatatggactctgaataatcaggactgactgtatatgtacatacacacacatacacatatatgtataacacaaacacatgcatgcacgtgcaaccgtttgttcaggaaaaatcctgatttgcccactgcctttgctccatcctccaggcccagcccctccacttctctgcctggcccatcgggccagctcccaccacctgcccagtcactggtctctgaccctgccttcgccatcccccagccccaccctccagtttctcaactctctctgccccatgtcctcctctgccccatggatctggggccagctcagccctcaacctttctccctggacctcaactccttgctggcctcctgtgtatccccatgtggacccagagggtctctttacacctgtccctgaccctccctgctcacagcccaccctccctcccatggctccccagcacacactggccaccctctgactccatctccccactccttcctcccattgcatgtcccagccacaccaaaggactcctaggcccacgaggccacacatccacgcacgtatgcctctgcacatatcgctctcgctgcctgggtggtcttccccaccctgagctctggcaggtggctgttctccctttgagatacagctcgagggcttggcctcccaagaagtcttccccagacccctccaggcggaggaactctgtccctcctgggcctgtgcgtaggtccacagatgtcccatggcggccattgacatacatgcgcaggaaggcccggttgtgccatcaacaggacattatacactgcacagcaacaccactgccaccacctgccatgggctctccctggccaggtgggcagccctaacagcgggtccaaagctggctctcatttgtgctttgcccagcaaggggccttgaatgccagaaagcctcggggacttcaacggcctctcctccttcttttactcattttgtctgtcgtgaactacaatgtgcaaaaaatgagtatctgttgaatgaatggaaaaaggccatgtataccagtaaaccgtcctagcgcagggcaccttagggtgccaggaaacgagcatgtagcaacatcgcccccttgtggtccccttggttattgtctgggctaacagactatgggctgggggtgaggaggtgcatctgggggacagtgtcaacattgccagctactctccagagagcatttttgtgcgcctggccctctatggttgtggtctggagctggggctgtggaattactgttatccatgctgctatcattgatatgagatgattaccatgacctgtcttaactcaccctgcaccatgttggcgagtgcagaccctctctgtgaaccagtcacattcaacaagtctctttagatggggggatgtgaaaagcatgataagaccgctcttaggagttaggaagtgaagtggggagaagactcaaccgaggggagccttggagaccagtttccctgacaagactggagttcagaggcaccatgggctgattctaacctgggtgtccagcacagccactggcctcaggaacctggcactgaatgcgtaagtggagagggttcagagctgtgctgtcctgtctgcctaggaatcttgcctcccccttgcccacctgggaggctcttgtgttctctagagaccaggtcaggcatctcccaggtgagggtttccaggagccggtggcggggtcctgtgcctcccctctgctcccacagtgccgggctacctccaccctcacctgcagctcctgcttcctgtccgtgtctcctcccagccctgaactcccgacattggggctgcgtctgcccgacctctgtgtccacactgaagcctgggcgggctcagcattcactccttagttgttcttcattccactacgatttttctttcctttttctttttttgagacagggtctcactatgttgcccaggctggagtgcagtgacaatcacagctcactgcagcctccacctccttggactcaagtgatccttccacctcagcctcctgagtagctgggactacagtcgcgtgccaccacacccggctactttttttgtagagatggggtctcaccacgttgcccaggcgggtctcaaactcctgggctcaagcaatctgcccacctaagcttccaaactgctgagattacaggcgtgagccaccgcaccagatctgctgctattccttgggcacccacaatgtgtgctctctgttgtatccagagaaggatgtgtgtgtgtgtcacagggaattgaggcccccctactgccctcagtctcctgccttgggactgttagtgagaggagtgaaccctccctcatggaagctgcagtgttttggggtctccttgtgagaacagctcagtcttgtcctgaactaacccattagagtgtgtgagggagcatttcactaccttcacttacacagggactccagcgggccactcattctgtgactcgttttcacctggcttcatttcaaaagaaacctgtctcaccactgtgagcagaaaaccccagcaccatctgttaaagctagagagtaagtgtaaaaataagctccaagaaaatggggcaatggacttgtgttctagcaggtcctgaggctggcttcccatgcagaggttgcctgcggaagtctgggggctgaaggcctgtctcttcctctttccgcagggatgttggggcaaattagcatcaaactgtgtcatccttcttgccactgtttaaagcttcatggtccttcagggggcattttacctgttaccatcgctgcgagacctgcccctgacattagacctacaagtgtgctgcacacccccaccaacagtcccaccagtggacacccaggacctggcctcatgaccctcatcagtctgacctctgacacaccatgtgtttcaccctttagctcctgtctcccgcaataggatgtgagctccctgagggcagggatttttgtcttactcattcctgtatccccagggcctagaacagagtctagcacatggcaagggttcagtatttgttgagtgaaggtaggctgggtccaggaaccaccagttcacctcataagcctcctccacttgggaagcagcacgtaggtgacatgggctgtctctggagttgaatggcccaggtttgagcccaggagcccctgcttagtagctgtgtggcctggactgattacctaagctctctgtgccacagatcacgagagcacgcagctcagagcagttgtgaggatgcaggggaagcaccaggggcagtgcctggcacagacaagtgtataataaatgttagctttgaacagtcagtagaaggaagtcaaaatgacgacacacatccccttctctgaaggaggatgaaattctgggcatggtgccacttatgccaattaaacacatacccaagaacatcatagagtttttaaggacacagatgcatctaaactaacacatttaggagtattcagaagtagtgaactaggtgtatagttaaagttaaaaacataacattgagtgaaagaaggcaagaaacagcatgaggtttagagcatagtgccatttatacaaattaacacacagtaccaccatatatagtttaaggacacagacatgtctatagaaaattgatttagaagccggagtcagaagcagtgaactcggtccacatgtagggatagggttaaagctgaagagagccagagacagatgagacgcagagtggaacatcacttacgcaaatcacacacagcaccacggccagcatgcgattttgagggtacaaatacatctaagtgaacacatcagaacacatgttaagtgtgcttgagcagctgtccatggttgagagaaggaagttgggagacacgaagggagtaaaataaaacgagaaaggcttcatgtgagggaaggactgggaaggacttcacggcacactaaggacagggaaacatgagggactcaacgccatttactggagggttcaccctcttcccactctatatgccttcccagataatctcatcctctcctggggcttcagctgatggctccggagatattcccggggtctgagtctccctttagacttcactcctgcacttcagacgtagatggccagctgcctcccagatgacttgggcaacaagtccaagacggagtcttgctttgtcacccaggctggaatgcagtggcgagagctcggctcactgcaacctccacctcccgggttcaagcaattttcctgcctcagcagggattacaggtgcccaccactgcttcggctaatttttgttattttcagtagagacagagtttcactatgttggccaggctggtctcgaactgctgacctcgagatccatctgccttggcctcccaaagtgctgggattaaggcgtgaaccaccgtgcccggcctgggcaactgatattcatgtctgaagtgcatgcctagcacgcccgctaggatcagctgcccactgtccttggtgctgaactcatacccacagcgcttcccttttgtgctccgctgtccctggtgctgaacccacatccctagcacttcccttttgtgtcccgctgcctgctgttcttggtgctgaacacacaccttagtgcctcccttttgtgcccagctgcctgctgtccctagtgctgaacccatacccctagtgctccctctgtgtccagctgctcaatgcccttagtgttcaatctcaccccagaacttcctcatatgttccgctgtccaccggctttggtgctgaatgtttaaaccagcactggtaagacctggtggtttacacagaggtgaaggcactgatctggcagtgtggacactgcataggtggtgctaccagtgctgaggcagggcctgggcctatcctgctcagattgcctgcatgtttgtgatgaatgagtcatagtttcccacacacaatgagcttttttttttttttttttttgagacggagtctcgctctgtcgcccaggctggagtgcagtggtgcaatcttggctcactgcaagctcccactcccaggttcacgccattctcctgcctcagcctcccaagtagctgggactacaggcgcccgccaccatgcctggctaattttttgtatttttagtagagacggggtttcactgtgttagtcaggatggtctcgatctcctgacctcgtgatccgcccgcctctgcctcccaaagtgctgggattacaggcgtgagccaccgcgcccggccacaatgagcattttctctgagccagcccctgtgctaagtgctgtgtgcacctgacttccctgaactctttgcagtcccataaggtagtagctagtaggagaccatctcatggagcaggacactgaggctcgcagacgttaacaccccacagtggtggtgccagagtctgagcccaggcagtgtggctccggaacacctgcctcgcctgctgtgtggacactgcagcacatgcctgtgcggctcagaggacttgggctctgctggatgccacctccccttccctcctgctcccagttgggctctgggcttctgtccacctgcaggggttctgctgaccacctgcaggggttctgctgacccctagactcacttctgtttttgcttcatgatgtcctcagtgttgggaaggcaatttgtccatggcagaaacccgtagagccacttcagcatgcagtagcccaggctctggaggtcgctgcggcgggagggccctggggaaggaggagtaaaggtggcagctcaagtctggacgctccactcactggtgggtccaccccccttccttcccctctctctcactgactcaaccacacactcatacacccagccttccagccatatgggctgtctcctccgctcattcactttcatgagtaggcagaagctgactcattctctctctcactcaaccattctctcagccccttttaccaggtcaccctcatccactcctctttcattcatgcactcattcaatcaagcctcagcacccgtgtgccaggcccagctcacttctgaaaacccagaccaggatctcgtcgggtcccagcccgtgacagcctagtggggagacagctatagcgtgcgactacctgagtgacaaaggacacagaacacacgggagcccagaaggatgggtaccaaacccagcctcagtgggggagggcgggggagactctgacagtttatttttcttatgcttcctgagcataagacaacgcttaatttagacaacgctttgtgtaagcactcgacaagcactacttgtccgtgctggccttccaccacccgatgctggaggcaggggtgccatccctgtactgggggagctcagtctgatgggaggatgtggcaggcatgtggacggccatgatataaagggatgtgagaaagaggggctcaagaaatctgccctgggccctcttcctagtctgtacactttccctggatgatcccatcctctcccagggcttcggctgataacttctgagatactgcagagcctctgcccagatctccctcccacactccagatgtggtggccaaccacctcctcaacagcccctcctggatgactcctaggcaactcccatcttccaagtctacaacagatcctgaaccccaacctctggaactcaggctccccagtgcccagcctcccactatgcttagtgctgaaccgctaccccacccacctcccttgcggtcgggacgctgtctgtggttccaatccctgtcctggcgcccttagtgcctctcctgtctggccacctgctgtctctggctgtgaactcctagagctgcccttgtataagaagcatctctctgcggtcccaaacccatccctggcctcgtaccgcatcccttgtgcaggtccatgctaatgaactcaaggtccccctcgtgagggctcctgctgccttccacgtaggccacgtgtttgccacttgggcaatagcggaaggcgaagccatagcctgccaaagtcacctgtggacacagggaaaagccatacagattggaggttaggagcgtagaagtcagagatttccatcgtgggtgcaagtgacaacaaacattctaccaaagatggcatttttcacttacaaaactaaggcatgctcatagtaaaaatgatgtgaagtaaaaagaacccaaaccagccatccatatttcctcccagcccctaaaacccatcgcccagaaataaccactagtaacagtttcgtatgcatcattccaaaatttttttttttttttaaataaccaggtaaacatatgtggatggggagggggctcttgttttccacagaggcctcacaccagacctcctgttgggcaccggcactttacactttaatagtggttctgggcattaactctggggccagatggcctgggttcaaatgccaactcagcccgctggtggcggtacaaccttgggcaagctataccagttctctctgctatgatttctccatttgtaaaatgatgataataatagtccccacctcaaagggttcttataaggcttaactgagtttaaaacaaaagttaaatgctttctgcctgatacataaagttaaccaaatcttctttcaaaaatatctacttatttattttgagatggggtttcactctgtcacccaggctggagtgcagtggcgcgatcacggctcactgcagcctcctaggctccagtgatcctcccacctcagcctcccgagtagctgggactacaggcatgcaccaccatgcccagccgattttttgtaaagatggggttttgccctgttgcccaggctggtcttgaacccctgggttcaagtgatcctcctgccttggccactgtgcccagtccatgtcttcttttcaatggctgcatcttattccaccatatggatagtggacaactgttggttttgtctatgtaagacctatatacacttccccggctccctgtttttctgtttacagtttgtggtgttcattaaaaaaataattttttttttttaagttttgagacagggtctcactgggtcacgcaggttggagtgcagtggtatgatcatggctcactgcagtctccatctcctgggctcaggtgatccttctacctcagcctcctgagtagctggaaccacatgtgtatgccactacacctggataggttattattttttattttgtacagatgaggttccctatgtttcccaggctggtctcgaactcctgggctcaagcgatccgatccttccactttggcctcctaaactgctggaattacaggtgtgagccactgggcctggccatgatggtcatttttatgtggcaacttgactgggccatggggtgcccagacatttggccaaaccctattctgggagtgtctatgagggtgttctggatgagatgaacattggggtttgtagactgagcaaggcagattattctccttaatgtgggtgggtctcattcaatcaactcaagatgtgaatagaataaaaagctaagtaaccagaagctcctcctccctgactgcttgagctagaacattggtcttttcctgcctttggacttgaactgaaacaacccctcttcttgggtctcaggcctgctggcctttggattggaacttacatcattggctctcctaggtctccagattgcaaactgaagaatctcaggactgcttagcttccattatcaataagccaattccttataataaatctctacacacacacacacacgcacacacacacacaccctgccagttctgtttctctgaagattcctaatgcttagttccaggattttcatctgggattgcttttccccagttctcagtccacgcagttcaggtctgtttctgccagggctgctaagctttggggatttaagcctaatttgctggtggcaattttgtcaccatgaggaataagtctgcctgacaacgagcagtgcagaagcatgaggagtccagagatgggagagccggcttcccaatgacagggtttgagctcctggatcctgccgtgcccgagacagtgcagtcctggattgctccattctgtggactaatacattgcacacagtcccttttggtttttggcttaaggcatgtaaagttgggtttctgtcatttgtaattgtaagagcaattagaagttactttaaaatactatttaatcagtatcccgcttaaggtgtttcccatttcactattacaatcagtgttgccaggaacatcttgtacacttatctttgaacaatcctatgaatatataggtaggacaccttcctaagacaggaacttgtggatcaaaaaacaggtgcattttggccgggcacggtggctcaggcctgtaatcccagcaccttgggaggcaaaggcgggcggatcacctgaggtcaggagttcgaggccagcctgaccaacatggagaaaccccatctctactaaaaatacaaaattagctaggcgtagtggcgcatgcctgtaatcccagctactcaggaggctgacagagaatcgcttgaacccaggaggtggaggttgtgatgagccgagatcgtgccattgcactccagcctgggcaacaagagtgaaactccatctcaaaacaaaatcaaagacaaaaaacaggtgcatttaaaactgtgactgttattgccttccaaaagggtttcccaattcatgcttccaacagtatatgaagaattcctacttccttatatccttatcagcaatgaatattattatcatgcttaattttgttcaaagggtgaaaatagtatcttgttttaagttacatctctatagttactaaggaggttgaatatcttttcatattatttagctagcctgtggatttctttttttaagaattgcttttcttatcctttgtccattttcctactaagttgcttatcttatttatttgaaggagctctttatatatgatggacagcaatcctttgtctgtaataagcactatgaaataaatagagatttggagacagatgggaacctgagcccagagatcttccagagtgggcaggagctggctcttacctgactctggtcctctggatccacaaagatattttcagctgtcacatttccatgaacatactcattctcatggaggaactccagggcatccagctgggggaagaagcaagtcagtgtctgcatgagcagtacgactaacacagagaggctatggtgcagaccaggagggagccccactattaaggcctggggttgtccgacactgtgactgggggttaaacctgactaaatccggggtagcatgaggagcccgctgtgacagcacattgagcacgcctctaatcaggctctcaggaagctcatcaattgagctaaagcgtggcttcctatctactcctgtatttctctcttagctgatgacaaactcagcagagggaaaaggggttaatgtctctctgcaaaaatgactcagcacctgtggatatcaaagagctcttctcacctgtcctagagagcagaaataaatcttgttaagcaatttatatcttgatctccagctccagctgtccctatgagctccagactctttttttgctgtgtgtatatatatatttttgagacagggtcttactcctgttgcccaggctggagtgcagtggtacaatcactgctcactgtagccttgatttcccaagctcaggtgatcctcccacctcagcctcacaagtagctgggactacaggtgggtgccaccacacccggctaattttttgtatttttattagagagggcattttgccatgttgcccaggctggtcttgaactcctgagctcaagtgatccacctgcctcgtcctcccaaagtgctgggattactggcatgagctgctgcgcccggccaattctttgattgtgtctgctgcctgagtgtcagctacattctgatcatatccccaaccctctttgaccccagggctctactgtccaccaaattctgctcgttctcctcctatagactctccacccccggggcccgggaccctcctcagccttgtcctctcccacatggaccctcactcagattcttctccccattccagtccctccccatatggcccctgagggcctttctgtacccagagctgaccccgccctcccctaatcccagcactcttgtggctctccagtgccctcaagacagatcccagcccctcagcctgctgtgcgaggccccgtgtgatgtggtcaccgctgacctctccagaccaactccatctcttccgcactgcagtgccatactgcagatactgaacataaagaccttaggactcagcatgtcgctcccttggtacgtccatccctccagcgatgcaaactgggccctcttactctcaatcacagcaggggccgcttctattcagagcacttgtcatagtttgtgcaactgtttgattcactattggcccctcccactagactgtgagctctaagacacagaaaccatgtttatgctgctccctgctctgcacccagccccggggacagcgtctggcacccagcaagtgcctgatgaatatttaatggggatgaatgaatgaactaatgaacaaatgccatatgctctcccttccacacaagccttgccccagctgtatccttggccggaccatcctctcctcatctatcctcttcctcttccacccagcactttgctatttccactcatcctgagagtcttggcttagaaacaccctccaccaggaagcctaatctaagccttcagtttgaggccggggctccttcctccaatgctcatggccccccaagggccctccacaggactgaccacccatcatctcggctctaaccgcctgccatggcagtcagtgagccagcccccagtgtgcagcggaggggggtgggggccggaagtgtcaatgactaaagtgcctgctaaactaggatgtgatgtgccctccctgacgcggcagctgagcaacttctgggtacgcaccagccggcaggccacctgcagcacagacctctctgacagcacatgctttgggctgacatccagggccgactgaaggctcctccccaggctgggtaacaccaagaacctggaagacacaagcaccccaggaggtgggagatgaacaggggagagaggagtaccggccgccaaggatggactgttgcgtgggctgcaaggtcctggtcccaggtgagatcaaaggttctgactggctgggcagcaaactaggtcaaaactacgagaaggcaggaagcaaagacctggcccacggcttcggggtcccagccatgcctggagtcacaacaggaagaagaggaaagaggccggtgaggcaagcagtgagcagagcagctcacctgtatttgtcctggtgaacaccgaaacccatgcaggtagggatggccagcagtggggtcgagtacagcttcttccacttgttgactgcggaaagcaggggcttgaggttagaacccacccagtcccaagcccatggcagtaagagctagttctcagagaagaagcacagagtgcccagaccgcctccaagtctccttgttggaggtgacaacattgtgggtgggtgatggtgggaaggggctggtgacagggcaggcatgggtgaccatgaatgtctgtgatccaggtctgcaggtgatggggtgatcatggtggctctggaggaagcatatacaagtctggagtgcagagatgggataatgacagggttacttccgaattcacacatagagctaacaagatcaacacgtgtctaacctagccatggcatcaccggaatgtgcctctgcctgtcttccagatctcagtggggtggaccagaaccaatggcgagctgatgctagtttaacagctggctatccagggaaggcagtcctgatgggtagcatttgctaatttcttttttctttttttttgagacgaagttttgctctgtcgccctggatggaatacaatggcgcgatcttggctcactgcaacctccgcttcctgattttaagcaattctcctgcctcagccttccatgtagctgggattgcaggcttctgccaccaggcccagctaatttttttttattttttattttttttgagatggagtcttcgtctgtcaccaggctggagagcagtggcgtgatctcggctcactgcaacctccacctcccaggttcaagtgattctcctgcctcagcctcccgagtagctgggatcacaggcacgtgccaccacatccaactaatttttgtatttttagtagagatggagtttcaccatgttggccaggatggtctcaatctcctgacctcatgatccgcccgcctcggcctcccaaagtgctgagattacaggcatcagccaccacgcccggccttttttttttgtattttcaatagagatgggttttgccatgttggccaggctggtctcgaactcctgacctcaggtgatccaccggcctccgcctccaaaagtgtgggaattacaggcatgagccaccgcgcccgactgcatttgctaatttctgcagtgtaaataaatactcctgctatggccaactccaagctaccaacatgacatgactggaggtggggtgggagagatatacaggggaggccatcatgcagcattctcaccacacagagacaatagtgcacacaacctcactggcagagatcacaggacatgtaggaaataattaggaagtgatgaatttctgagggttcattacctttgttttgaatataatttatttgtaaaattatgtaacttattttatatattttttgagactaagtctcactctatcgcccagactggagtgcagtggcatgatctcggctcactgcaacctccaccttccaggttcgagtgattctcccacctcagcctcccatgtagctgagattacaggcacacgccaccacgcctggctaatttttgtatttttagtagagatggggtttcaccatgttggccaggctactcttgaactcctgacctcaggtgatctacccacctcagcctgccaaagtgctaagactacaggcatgagccaccacgcctggcctatataatttaattgctagtactggctgtctgtaacaaccagcttgccatcttcctaaaaatttatttttatttttattttttttggagacagggtctggctctgttgctcaggctggagtgcagtggcacaatcacagctcactgcaatctctgtctcccgggctcaagcaattctctcagctcagcctcttgagtagctgggatcacaggtgcatgccattacacccggctaatttttgtattttcagtagagataaggttttgccacattgcccaggatggtctcaaactcctggcctcaagtgatctgcccacctcagcctcccaaagtgctgggagtataggcgtcaacccacgcccagcctgaaaatttaatacttggcttccaagagctggtgtgagccagtcacaacacacactgaggcctgaggggtcacaggagtcaggttatggacacagatgggagcaaacctgggcctttaatctaagcccacccttctcatgcctgcaggtagaagtcaagtgctgtgaccaagttggcgcccccctcactctcccctccttgcccagttccctgtcaggtaccttgcagaggcttggcggcccgctggaagaagttctgctcattgaacaagcgcccatccttggcatcctggtgggggacaggaggggcagaaggctgtcacactgaagtctcagataagggcccccagtccccactggcaatttgttactccctcaatgaccaggctcctcatcaagtccccacatcggagccaaattcctcaggtactgcacacaaacacacatcagagactgcgagctaccttgctgtacccaggttccttttctttctcttatggtaagagccacagtgttccctagaatgtagccttcagcataaaaactacgtttcccagcttcctttgcagtgaggactgaccacatgaccaagttctggccaatgaggatgtgagcagaagaaatgtgggcaacttccaggttatgcccttagtgggctgggacaggctctacctttcctcttctgttccagctggctgcaacgcagatgtgatggtggaagctgaagcagccactacggcccaggagatgcaggttatgcgttgaaaatgttggtgcaaaaagaaggaaacagggccccttgtttataaaaccatcctatcagctctggaaaactgcccctgacttttaaatgaaaaagcaataaaacatcatcttgcttaagccaccattaatattaggtatttgttaaaataacactaaatggccaggtgtggtggcttaggcctgtaatcccagcactttgggaggctgaggcaggtggatcacttgaggttaggagttctagactagcctcgccaacatggtgaaaccctgcctctactaaaaatacgaaaattagccaggcatggtggtgcgtgcctgtaatcccagctactcgggaggctgaggcaggagaattgcttgaacctgggaggcggaggttgcagtgagccaagactgcacctccagcctgggtgacagagtgagattttgtagcaaaaaaaaaaaaaaaagcaccaaatattttaattaaacacaactcatgcagctgagttcttaagagtatagagtcaaacagatctaggttcaaaccccagctctgccattcattcattcattcttcctacaaagcctccattatatgctgagtattattctgggcattggggatatagctgtgaacaaagcaacctgcgtgctgggtgcacctgggcaagtgactgagtctccatttcctcatctgttaaataggaacatggaagccatcccataggcttgctgaaataattcaatgacatagtaaacacacatacacacacacacacgcacacacaaaaccccaaagaaaaccaaaaggctgggtgtgatggctcatgcctataatcccagcactttaggaggtgaaggtgggagcccaggagttccagaccaacctgggcaacacaggaagaccccatctctaccagaaaaaaaaaaaaaaaaaaaaaaaaaaaagctggacgtggtggtgcatgcctgtggtcccagctacttgggaggctaaagtggaaggatcacttgaacctaggaggctgtggctgcagtgagccttgattgcaccgctgcactccagcctgggtgacagagagagatcctgtctcaaacaaaaatccaaaagaattaaatgacataatgcttgtgacactcagcccagggactgtcacataataggttctcaataagcaggtgctgctactggtcattagtgagcctggctccctgccccatcttctcctcttcttgtccttttctctttttgcgtcctggagtcctccccacgatgctggcgaagcccatagtgactgacgcgagcgacgtgggcacagccatgcaggccctgagcaatctcatgtggggtattcatgcctgccccactcccccaagggggcagctccttcagggcaggaattgggtctgacccatctctgcagatgtccccagcactcagttcacaggaggttgcaggaaaggcttggtgaataaatgaataaatggatggatgaacaccactgggcattcagcccctgacctttcgaatgcttcagaacagagctgccttcccagtggatggggagggtgaatgtcttctggttggcccagtgccctgtgctcccctcccagcccacccctcttcccgatgggactgggacatgacatggctcccgccagactgggagcctctccagggctgggcctggggccaactcatcatcaccaagttttgagcctcaggaaatgttgatgaggtcagatgcacgaacagagagcaaggctgtatttctaggatgatgagcataattacagtagtaataacaggaacagctcaggttgatggggtgcctactgtgccagacacacctgaaccatgcagagaagtgttaaatgggacacggtagctgccctactgggaggattcaatgaagcagtgcttatgaaacacagcccggctcaggcaatgccaggctctcaaagcaggtgctacccaccactagtgagcccggctccacagcccacgctctgacccactctcatggcctccacctagggcggagggagggcaactgacccagctgtccctggttttctggggtgtgagacaattctgataaacaaaaagaaaataagagtcacctgtaatcccagcacccagggatgatggcggggctatgaaccaccacgatgcccttctgttaggcacctcctctgtgtggaaggcgtgattcaccctcgtggccactctccctttctctatttgtttccttttagccccaacctcgagtgcacatgtcctgtctgctgagactcatgctcggcacccgatgtgtgatttcactgaatcctcagcacagggaccccatctgctgggttctcttttggaccccacacccagcacggtgatacacagtaggtgctcgatacgagcacgctgcgaggccggtggtagggggcagatgggccacaccctgtgggtattagtggctccatttcacagatgaggaaactgagctctgagggggatgggcttgcccaggtcacacagcagggaagcatcagagccagacttgggtggatccaactgtgggtttccaacaccctgggatgatggagaactgggcgcctgccccgcccacggtcttaatactccttgcaggtggggaccctggcccccggccgagctctcccagctgacagacgggctcagaagtcaaggatgtgtttgtgaaagtccctcccctccaagctgccccccacctgcagggtcacttaccagtttgagtgagaacttttgcttctgtggtcctgagtcacaggtgagggtggaggtgggtgcagctgtgggggaacaaacaagggagtgaggttataaccacgcggaaggtcagggtcatcatccccaaacttcccagcaatgagaagcggctctggtgccctggttccaacaaggtcaagcgcactcttggctctcacgacttgctgcttcctagttttaaataagcttcttcttcctctttctctctgtcactatccagccatgcaggaagggctaatgcagcaggcctgagacggctctcctggcaaggtctgggaccctggattccgggagggctcccagaatcccctaagtgagtggggctcgctgagcctaaactgcttgtgcaatcactgtggtttctgtgcaacacctgctttcctctggggaacctgggatgcggatacatgtcagacagagggggccacatgactactccccaataacagccccgagcactgagcctctgaggaacttcctggtggacagttcccatgtactgtcacagcctgtggctgggcaattaggtgcgtcctaggcagagtgacttcatccaaggccacatcccagggtgacccaggtccagtgactgattgaggtggacataaaggcccagcctctcctggcccaacacggacgcacgctgaaggaccacttttgctccagagccctgcagggtcggctgaggccatcactgggctgcatcgcagcccacctcctgctccttaccccctccttgggttctgatccctgaggcagctccccataagcaccctgcatgcttgtcccccgacagagcctgctccagtagcccttactgttcatttacagacctcaccacgtctctggccctgtgctaagtgtgggcttcacatgcatggtcccatctgacagatgagaagaggagagaggccaagaaacgccaggctgacccagggttcaaatcccagctcctccatctgctctctgtatgactttgggcctccatttgcatgtctgtaagatgggagcagtaaggcctaccccgagactggctgcaaggactcaacaggctggcaggagtaagagcagcaccagcgatgtgtgcagcaagagtctgcatcccccttcacgcacactgctcagtgaacccactcagcccagagcccagcacggaccctggcacatcaggattgctccacaggtggtggccttaaaatatccccataacaccagggctccccagccggggagtggcagagctggctcaacctgggtctagctaatcccaaagcccatgagttgagctcttgtcgcccgcacacctgactcacgctggtgtccctccttcctctgttctcatcgttcccactctcccttcatcatcgaggctggtatcgtctaagacactgagctgagggatggggggtgacaaagtcacccagaagccatccttgccctcaagaagctccagctggaacagggttgggagccagctctacacgttcaaggccaagggtgctctgagcccaggggaagagagggagacgtatgcaggacccgcatctcggggaaagaaaaatcctttccagctgtggggagagcactggggggatcatgctggagcaggctgtgacatcatgaccaagcatccgcccagctctggaacccaggcatagtaacagtgcctgtctctcagaggcaccatgaggttaatgacaatgcgtacgtgcccggtactcagaggcaagcaggaaaagctggcaatttgatacaattttataatctgctttgcagattataaaaagcttttctctttcacttttctaactggccctgcagccaacagcctggaaagctagctgggcaattttcattgtagagggagccaagggaggccagaagggaaaaggggcttggccaagggccccagcagagacaggccacaagcccagggctctagactctgtgatctagggtggcagatccaggtttctgcttgccggaaacctgacaaatggaaagtctctacatgtgccaaatgaagaccagggcgtggcatgcaggcaggtgagcacctccccttcccaaaggtcagctggtcctgaacttggagcaggagcactgttctgggacccatcctgaccctaacaccagaaagcacatatacggcagtggccgttttcccggcatcactctactcatttcactctcctgactgcagccctgtgagggcagtagcattaccatctcccctctgcagatgaagaaactgaggcacagggtcatgctgtcattcgaaaggtcaagcgacaagcggcaagcagaggcagcccagcccaccactgagctccagggtgccccatgccttccacctccccaggccctgctggggaccctgactgacttctcccctccggcctccagaaggaatcagcagagccaacacctaaacttcgtacccagtgattttggacttctggcctccagagctgtaggagaataagcatgtgctgtgttaaaccactcactgtggtaacttgttacagcggccacaggaaactaacacaagccccacctttcatctgcaaaggcagaagctgcagagggcagcgtgggcccgaccctgagctgctgctcacgggcagctctcccaagtgcaccgcagtgagcagccgcacggattcatgtgactgatgacggatggtggttctcccctatagctcagcgaggcccgggatatatgacattatagttcagtactggacagagacacaagagttaataaaatgcttagagcatggcgcagagagtggggtaaagtgtccactgctcgaataaccataacgattcagcttgttcttgttgttttactgttattgctttaaattacgggacatacaactccaccatctcttcttgactggtgcaaactggcagaagaaaagggcgatttgctctggggcgatgtcacccaatggtggtgtgtccccaaatgcaagctccgcatcagcagggccttcaccagccccgctctccctgcactgtctgtgctggcaccgcggccagacacatgaaatggtaggtgctgcttaaggatccactgagcaaccgggcacagtgctcacgcctataatcccaacactttgggaggcagaggcaggaggatggcttgaggccaagagtttgagaccagcctggccaacatagtgagatcgtctctactttaaaaaataaataaataaagggactgctgaaggaatggatgactcacacaggctgggcactggggtttgctatttttatcaaacaacctgagtcatataagggaaaaccaaaaccacattggcccagagtagctcctcctgtgcttccactgtgggtttctgggggaggtcaagcgtggtttcttctctcaggagctcctggctctgtgtgttttcctctccttctccctcttccttccccgccctcctgccctctccccaccctgctctctcacctcaatctctttcttactgttggttttcatccttctccctttctcctccctctgtgctcctcggcccctcattccttctcatcatgatcccttctcgctctttctccctgccctctccttctcctttctctccctttcttgggagaagccagagtgcctgcgttcaaatcccagctctactacttccaggctgtgtgcccttgggcaagtagcttcctctctctgtaccccagttgcaggatggggtaatatgggtgcctatctcacagtgtggctggcagcattacatgggtaagacacagagagttcccaaagtgtctggcatgggatcctgcctgtaatcccagcactttaggaggctgaggcgggaggatcgcttgagcccaggagtttgggaccagcctgggcaacacagtgagactgtctctatttaaaaaaaattaaaaaattagcctggcgtggtggcgcctgcctgtagtccaagctactcgggaggctgaggggggagaatcacttgagcctgggaggttgaggctgcagtgagccgtgattgcacaaccgcactccagcctgggtgatggagcgagactccatctcttaaaaataaaagtgctggcacaggtgagtgctccctaggtgttagccacggccctctttctcttgctcctgcttggtcttggtcacactctttcccctctccctcacctttcctggccctgcctatctgtccctctgttattaacactgcctacctctgcctgggaaggaccctgtacagttttccaagtgcttggcctccatctcctatcatcatttgagccaacagccccaggagacaggggacaaggcgtcatctcacttttccagtggaggacatcaaggcacagagtgcctgggctgtttgctggggctccctcagtgtgtcggagccaagtcaggactcagattcggggctgtctgaaacaccagctgtcctgcccacctgcccagacttcaaggcagggatggccaacggaaggctcaaaattgtctacgtgcctgtctggccagcaggcacttccaattcaaagatttcctattgaaatctaggtttcaagcttttcctggaaaacttggaagattctggagcccagagcctaataattcacatctctgggatccatgttcctcatgtataaaatggggatagggatagtactgacatcctaaggctgcggtgagaatttagcaaacctctgcccatcaaataacttgtaagcaaatattcatggcagcgttactcataacagcccaaagcggaaactacccaaacgcccatcagctgctaagtggctaagccacatggggtgttcccatacagcagaatatcacgcagccataaaaggagtgcggcagtgacgcgccacagcatggatgcaccttgagcacacgccgctgggtgagggatgccagacacaagaggccacacagcgcaggactccacttctgtgaacacccagaaggggcaaatccacggagggagaaaggcggttagtggctgccagtggactgggggaagaatcagagtgatggctcagaactactgggtttctttttggggtgacagaaacgtcctggaattagatagtgacgatggttgcataacactctgaatatcctgaaggccactcagttgcaccctttaaaagaatgaattttcgtggtggctcatgcctgtaatcccagcactttgggaggctgaggtaggtggatcacttgaggtcagctgttcgagaccagcctggccaacatggtaacaccctgtctctactaaaaatacaaaaaataaaaataaaaaaataaaaaaatttagcccggtgtggtggcatgcgcttgtaatctcagctacttgagaggctgaggcaggagaatcgcttgaacctaggaggtggaggttgttaaaagccgagatcgtgccactgcactccagcctgggtgacagagcaagactctctctcaaaaaaataaaaaataataaataataataataaaagaataactttttgtttgacatggagtctcactgaataatttttttttttgagacggagtctcgctctgtcacccaggatggagtgcagtggtgcaacctcggctcactgcaagctctgcctcccgggttcacgccattctcctgcctcagcctcccaagtagctgggactacaggtgccagccaccacacccggctaattttttgtatttttagtagagacagggtttcaccgcgttagccaggatggtctcgatctcctgacctcgtgatccgcctgtctcggcctcccaaagtgctgggattacaggcgtgagccaccgcgcctggccaataaaagaataacttttatgtgagttttatctcaattaaaaagttccaaaaagaaaagaaaggaaaagaaaaacccatgtaaagtgcttagaacaggcctggccttgcagaagcactcaatatttattacagttaatactaatactactgccataattattttcctcattgtaacagagtctgagcttttcagccttgtgcctccctcctccccttccatcccacacctgggtgagcggatgagcaagcttgggtgctccctcctttggggtgtgcatccacgagactcaaaccatgcatggtgttggcccctgtgcagaaaccctgagcccagccccacccccaagcacgatgaaacacctgaccagtctcctttcctcactctcaaggcatctcagatctgtgtgggaggcctgcctgctctccacagagacccctattatgtaagcaataaacctctcacatcctcttggtgtgtgtgtgacatcatcagtctcgatgtttgaaccaaattttacgtggggatccatcctctctctgcacactggccagaacaaccatccttaacatgcagcccctgggcctgcactcccacgtgacaatagcaggtagcaggtggggtgaggaggggcacacttcacacagggcacatgccaactggccgcagtccccgccactcccaactgccttactccagcctgctgcactcattcccactattgcccggccctgcaggtgggtaggtatagagtccaaggtctaagagaaagttgcctagcgacaggtctgcagctagggatgtggcttccattcccattctcagaacggggtcccctcccactgtcctggtgctgagacgacccagtccctggccgcccatggacagagtgtaccttcatagagaatgccctggttgtccctggtctggaaggacttcagcttccactgtcgcccactcttgtctgtcagcactgtccctgtgggcaaagcttcaagtgaggtggtcactcggctccgcttcagcgtctgagggctctgcctggtcttctgagggctacagctggtcttctgagggctacccctggtcacctgagggctcttcctggtcttctgagggctgcttttgggggttgggggtctgctcccggagcctgcaggaggatgtaagaataaagtaaaagcaccatccaggagagaaaagttagatggggagtgaaacagcacgcaaaatactgttcctttacaaattcgttcattcaacaaacatttcctgggaccttctatgagtcaggcctttgtgtgatgatgttggggcaccagataggagtcggacctgcatccttccctcaggagtgcccagtttggtgggcaagtctgctctagacacagctagtcagatgcgggtctgagacagggcagtacagacagatattagggcccaaaagagaaagagatcctgcctggagaagtcagggtaggcttcctggaggaagggatgttagagttggatcttgttggatgaggagaagtttgccagggaataaaggacattctagacatttacccaaaaacatcctgaaaaaggactcagtcctgagatagaaaagggccaaaaaatttgttagaccaaagccctgccctagaagggctcctagcctggcaagagaatggggtgggtgtggtgggagacagacttggacacaggaaaagacatcgcttactctgttcctcccacccaccatcccctaaaggcaagtaatggcaagaggcctctgggcccagaggataatgaggagcaaaggggacgcctcacactgccactgtggctgtggcttcagatccaggggctcagtgaacaggagaaggaacatagtcctcaggcctcccgtgtcctgggcactggctgggcagagggtatatacactaattgtgctgggtccctacctgcaaagggcccccagcccagaaagtgaggccgaaagggatgtggagcctagactgacatgcgctccaatgaaggctgcagcaggcacgggggggcgccaaagaggctggaaagaggctctggcggacgatgaggaggtctggatgcgagcctatggcactcaagagaagcttcctagagaccagtatcggctgagtggcagtacacaaggccaagaacgaaggtgagagtgccctgggctgagggaacaggcttagcaaagaccaaggttaatccccaaaagtgttttctgggcaaagactgtgttgagggctaaagcaggaaccaggccacacagataccagactgaagagcttggtctgagggcaccaggaacagtaggggtctgtgtgcagggaggggccggggcagctctaggtgctgaaagacccatctggggccatatagaggcagactggagggggagatgggaggctggggaagctgctggagtcagagtccaggcagggatggatgatgtttgagccggggctgtggcagttttgtcccaaagatcatcagatgacctaactttgctccacttaagagtcaggccagatagaccttaactcttacctttggatctctcagaggaactcagagtatcttcagactcagaactgtcaccatctgagaagagggataatcggggagaggtgacggtgctggaccatttcactttcttaggagaggtttcaaaactggagttcagccctctctttgagcctaaagaaaggcagacaaaatgcagactggagttacaaaggcccctctgcaggcaccattggactgggagccctgaggttatactcagctatgctgttctctttggccctcaacaccaattcttgcttcttctattatgtaaatatatgagcaaactgttccttttagttgttctctccttcttaggtctttgcctctcttgtatcttccagcactttgccactctgtgtcctttccacataatgtctttatatgtatgtatatttgagatggagtctcactctgttgcccaggctggagtgcagtggtgcaatcttggctcactgcaacctctgcctcctgggttcaagcaattctcctgcctcagcctcccaagtagctaggattacaggcatgcaccaacatgcctgtaatgttgctaatttttatagttttagtagagatggggtttcaccatgttggccagactggttttgaactcctgacctcaagtgatcggccagcctcagccttccaaagtgctgggattacaggcatgagccaccatgcctggcctcttccatgtaatttcttaaaatctatcttccagttaactaattctcccagctatgtctagtctgctgtttaaaccacccaccgagtttctgattacaataattattttatatatatatacacacacacacacatatacacacatacaatgattgtgtgtatatatatacacacatacacatatatacatatatagacacacacatatacatatacacacatacaatcattagagtttttatttggttccttctcttatttgcctgtgcaactttaacctattccttcattatactttcaatttgttattttatttatttaaatgtattaagcatgctttgtaaacattctcatctattaattctaaagtctgtggtcttggcaggtccgattctgcagtttgttgtttctgctgactctccagctagcttatttcctggtgtctttgtaaatcaacagagactggtactcatgatccttggatgttgacctgtggtaattccctgatgtttgtctttaaaggatgttttccaagagaagatttgtttatatcaggcagggagtggtacccacatctcaccactttaagttaaatgttcagcttgcattttgggggaccacacagatcagtgtgaattctggccccaaactggtgagaacgtgaattcttggttaggaactctccaagaaggctgggcgtggtggctcatgcctgtaatcccagcactttgggaggccagggcgggtggatcgcctgaggtcaggagtttgaggccagcctgtccaacatggtgaaaccccgtccctactaaaaatataagaattagctgggtgtggtggcaggtgcctgtaaacccagctacttgagaagctgaggcaggagaatcgcttgaacacgggaggtggaggttgcagtgagccaagattacaccactgcactctagcctggatgacagagtgagactgtgtctcaaaacaaaaacaaaaacaaaaaacaaaaaacaaaaacaaaaaagggaattctcaaagaagacattcctcctttatttacccaccaccaaggcgacaaatgtctccaccaattttctgtggaacaattgcttttgttgtagttcacccactgaggagccccagatttgagaggaaatttccaattgcaactcctgtactgctaaggccctaagctttgtctcctgcaccccaataaaacacaggctcaaggccatcagcaaacagccccaggacaaataacacctatgtaacacttgcttagccctgtggtctctgttttcctgttgtttctcatctccatggactccccttactttcctaccacttagctctatattttaaaaggacattttaatgttttattccacatatttgggcacactgaacaataaggagtttttattatcatctggtctgccatattgctaaaaacaaatgtcctttctttttagttgacactgactaactcagccagcatggttggtccctgggctactggaatggcctcctaactggtttccatgcctcgaatccattttccacacagagaagccacagaaatctttccaaaatgcaaagcctattgtgttgcctacttggtagaagctcttccgcagctctccacgtcaccacagttaaaaccaaactccctcccatggtcctgcctgtcttcccccaggcagaaatgttcctcactcctccagcgtgtagttaaaaccaaactccctcccgtggtcctgcctgtcttcccccaggcggaaatgttcctcactcctccagtgtgtagttaaaaccaaactccctcccgtggtcctgcctgtcttcccccaggcggaaatgttcctcactcctccagtgtgtagttaaaaccaaactccctcccgtggtcctgcctgtcttcccccaggtggaaatgttcctcactcctccagtgtgtctggctcccctcgcctcacctctgctccccataccatgtcccagtggctggaacacatgtgccaactcccaccttgctcattctttttttttttttttttgagacggagttttgctcttgttgcccaggctggagtgcaatggcgcaatcttggctcaccgcaacctctcccttccgggttcaagcgattctcctgcctcagcctcccgagtagctgggattacaggcatgcaccaccacgcccagctaattttgtatttttagcagagacagggtttctccatgttgtttaggctggtctcaaaactcccgacctcaggtgatcaggctgcctcagcctcccaaagtgctgggattacatgcgtgagccactgtgcctggcccattcttcttcatccctagctcagctcaaactttacccacttagggagatcttccctgattccctgaaaagcatgttcccttatatatgttccagggtccattcagttcccctctgttatcatgcaacctgctgataatcatttattcaatgtctgttgtcttactgagagaccagaaaccagggctgtctcatttcttactataatcctcgggacaaatacagcacctcagcacatggcaggttacccatacatatttgccatctgatgactgatggagtgaataatgaactgggctctaggttagcattaggaaaggcaggggttgggttaagaactgactctggccgggtgcagtggctcatgcctgtaatcccaacactttgggaggccaggagtttaagaccagcctggccaacatggggaaagccggtctctactaaaaatacaaaaattagccaggtgtggtggtgcgcggctgtaataccagctactacggaggctgaggcaggaaaatcgcttgaacctgggaggcagaggttgcagtgagccgagatcgtgccactgcactctagcctgggcgacagagcaagactctgtcttaaaaaaacaaaggccgggcgcagtggctcacacctataatcccagcactttgggaggccgaggcgggtggatcatgaggtcaggagatcgagaccatcctggctaacacggtgaaaccccgcctctactaaaaatacaaaaaaatagctgggcgtggtggtgggcgcctgtagtcccagctactcgggaggctaaggcaggaggatggagagaacccgggaggtggagcttgcagtgagccaagatcgcgtcactgcactccagcctgggcgacagagcgagactccgtctcaaaaacaaaacaaaacaaaaaaaacactctgactctcaagttgggccaaggcaaacgctgttcacatttgcctggaactgtggagatgaagaagtcaacttgagacctcaaggcagtaagcatgggaacaaaagccatatgctaaggatggctcagtgcaaagacagaggagcctgggtcccttagggcatcatggggacaccatcccaatacgcactgtccccttttagtaagaaaaatattgctctacatacttgccagtgaaagaaaagaagaaataaacctaatcatttgtttaaacccttgtcatagcattttctgttatctgcagctaaacacactcccaaatgataaaatgaatgtcacttgactccccgccatgtatgctgactgccttctgcacaactgtccgatggataaaccttctttgatttaccaatatagtatctgggcttgggccttccagtgagcaagacctactactgatatttaattaattcattcaaccagtcagtaagatttctcagcacccaataccatgccaggcacagacccaggtgctgtgcaaacagcaggttacaaaaccacaatcaacacaggttacagaaacacaaaaagtttctgtccttatggagcttacagaagaagcaatccaagcaaaataatgtatttaatagggttgagacaagtaccaaaaagaaatacacagcaaggaagggggacaggatcattgcatagagggaagatgcaactttaattagtagtggtagggaaagtgtctctgagaaagtaacaattgaataaatatctgaaggcatggctgggcgcagtggctcatgactgtaatcccaacactttggggggctgaggcaggtagatcacttgaggccaggagttcaagaccagcctggccaacgtggtgaaaccccatctctactgaaaatataaaaatcagccgggcatggtggtacatacctgtaatcccaactactcgggagactgaggcacaagaatcacttgaactcgggaggcggagattgcagtgagctgagattggggccactgcactccagcctgggtgacagagcgagactgtttaaaaaaaaacaaagctgggcatggtggctcacgtctgtaatgccagtactttgggaggccgaggcgggtggatcatttgaggtcaggaatttgagaccagccggccaacatggtgaaaccctgtctctactaaaaatacaaaaaatcaactgggcttggtggcaggcgcctgtaatcccagctatttgggaggctgaggcaggagaattgcttgaacctgggagacggaggttgcagtgagccgagatgttgcagtgagccaagattgcgccactgcaccccagcctgggcgaaagagcaagactcagtctcaaaaacaaaaacaactaaaaacaaaacctgaaggcagtgaaagagtggggcatgcaggcccataagggaagaggcgtccaggagggagcggcaagcgcacaggctgaggcccaggcgtgctgaggtgtggaggggcagccaggaggccagtgtggctggaatagcaggagggtcgggaggtggggtctgaggggaaatggggacctggtcccttcacctcacttggggaagtatgagcagaggaatgatgggctctgactgtattcacaggatctctctggtggctgcgtgaagacgactacagggacaagagaggggagcagagggcaagaaggcttctgcataagagaggtgaggaccagggatgtgggaggtgcggagaaggaagtgggctgatactgcactgattgtaaagagggagccaacaagatttgctgaaggggtgggtgtgtcacggggtgcgagacaaagagaactcaaggatgatccccagggtccggcctgggaaactggatgaatggagtgctattcatggcaatggggaagtctagggcaggcggcaggaacaccaggagctcaggtgaaggcatgttcagactaagatgtgaccaggacatccaacacaggctgagcatcccaaatccggaaatctgaaatgcaaaatgctccaaaatctgaaactttgagtgtcaacaggatgctcaagggaaatttcactggactactgtggatttcagattttttttttttgacatcgagtctcactctgttgcccaagctgcagtgcaatggtgcaatctcggctcactgcgacctccgcctcctgggttcaagcaattctcctgcctcagactcccaagtaggtgggattacaggcatgcgccactatgcccagctaatttttgtatttttagtagagatgagatttcaggatgttggccaggctggtcttgaactcctgacctcaagtgctctgcctgcctcagcctcccaaagtgctaggattacaggcatgagccactgtgcccagccagatttcagatttttgaatcaggatgctcaaccagtaagtataatgcaaatatcccaaaatctgaaaaaatccaaaatcagaatacttccagtcctcatcatttcggataagggatactcaacctgcaggtgccaagctggcaggctgcacatatatctcctccaagcaggggagtccaggctggctggagatagaaatgaaggagatgttaacatggagacagtgttcaaagccatgaggccaataagaggccaagagactgatggtagacagaggggtccagtcctgaggcctgggcttctccagtgtcaggacagggtcagacaggctgcaaaggcatcctccctccgcagacacacacgtgtatgcaccttattcccaccgcagaaacaggctcaatgctctggttcttaccttggaaggatgacacatgtggattgacaaaggtctgggaccctacatgctcctctacaggcaaagaatttccacagtaggggcagaatttgaatgccgcttggatacttttgccacagtctggacagaaggagatcatgctacaaaacagaatgaacaaacacaaagtgaaacgggccagctgaaggtcagtggaagtattgttgaactgctcttaatcacagggtgagtggcaggaggcacaaccagggtcttcaactgtttgtgatgttcacttcttaaaacatgcaatgggaatgggagtgacagtcaatgttccccaaatatcaatatgctcccctatacttcccaggttcccttgcagcaaggtagaggccacatgactaattctggccaatggggtgtgagtagagtcatctcatggccgaggcagttaggagtcagaatacctcctctgcctccccctccacctgcagggatggccctggaggccatggctcccaactgacatagcaagatgaaggagggctgcctggtccacactggaacctcatgatcaacaaatacacttctgctgtattgagccaccaagatttcagggtttatttgtcatggcagcacagcctattctatcctgactaatttagtagaatgatgagtgttcactaaattactctctatgctttgcatctctctgagctaattcctgatactttttaaaagtccaaattacatactgagactatgacaaatgaggatatagaagagttttaagccagttaagtgaagaagggaaattaacaaggatgaagtacaacaggcagtttgtattgcccttcattatggcagtgctatttgtaacgagcatctaacaaagagcaatacgccgggtgcggtggctcaagcctgtaatcccagcgctttgggaggccatcacaggcagatcacctgaggttaggagtttgagaccagtctgtccaacatggtgaaaccctgtctatactaaaaatacaaaaaaaaattagctaggtgtggtggcatgcacctgtaatcccagctactcaggaggctgaggcaggaaagttgcttgaacccgggaggtggaggttgcagtgaaccaagatcatgccattgcactccagcctggacaagaagagtgaaaactctgtctcaaacaaacaaaacaaacagcagcaacaaaaaaaggccatttatttgttcttatagtctcaggcttactgtacattagcaattaaaagtgaaactattggccgggcacggtggctcgtgcctgtaatcccagcactttggaaggtcgaggtgggcggatcacctgaggtcaggagtccaagaccaacctgaccaacatggagaaaccccgtctctactaaaaatataaaattagccaggcgtggtggtgcacgcctgtaatcccagctactcgggaggctgaggcaggagaatcacttgaacccgggaggcagaggttgtggtgagccgagatctcaccatcacactccagcctgggtaacaagagtgaaactctgcctcaaaaaaaaaaaaaaaaaaaaaaaaaagtgaaactattgaaatagaagttaatataaacatgggcttgtgatttaatttcaccttgaaagagaatattcatttttaaatttttttagagatagggtctcactctgtcaccagggaggaatgcagtggcataatcatggctcactgcagcctcaaactcctgggctcaagcaatcttcccaggtagctggaactataggtatgtgccaccacaactgactaattttttaagttttttttttagagacggggtctcactatgttgcccaggctggtctggaactcctggcctccagcaatcctccggcctcagcctcccaaactgctgggattgtaggcatgagctaccaccctggctgcaagagaccattctgatcaaacccttttcctttattcactgtaaaggctggcttctgttgcaaatgcaaacagtggagtccttaaaatcacaggtttggccccaggctgccagatttcaatcccagatctgctacatgctgggcaagctacttaacctctctgtgtcacagtctaccccactgtaaaatggggcttctcccagctcctatctgatagaatggtcgatgaggtctaaatgaatacatttatatgaggtgctgagaacagggcctggcccatagaaagccttttatgttagtgcttgctgtgaccatatcatgccttgtacccaagttactatattccagtcattaatatttctattcttccctttcttctttgataggaagttctgagctcctcaggcctgtctatttcctctaggtactgacttttgaaattatagagcttgtccttaaaaaccacaggccatccccatcagctggtgaaagaaatctcagccacatgaggagagaaggggtcctggattccttttcctcaggctgcagaagagcagaaacactctgtggcataaatctgcccttctgttttttcaaacaaaggagtcatgtaagacatctggactgcaaaggctgttggtcaagtatcttttactctctagaaagccagtcattctaacttaagttagccagactaacttagtgatttgttgtcctgctaataatatgtaaaataacatctctttctcaaaggcacaaatactggtgagcatttttgtgaagctagaggtctcactgcctcttccctctctgccaggcaaacctgggtgttgacactggtgtcacaagaccaaattgcctagatgtacccaataaatatatacacctactatgtacccaggtaaattaaaaattaaaaaaaaggccgggcgcggtggctcatgcctgtaatcccagcactttgggaggccgaggcgggcggatcacgaggtcaggagatcgagaccatcttggctaacacggtgaaaccccatctttactaaaaatacaaaaaattagctgggcgcggtggcaggcgcctgtaatcccagctactcgggaggcttaggcaggagaatggcatgaacccgggaggcggagcttgcagtgagccgagatagcaccactgcagtccggccggggagaaagagcgagactccgtctctaaaaaaaaaaaaaaaaaaaaaagaaaaaaaattaaacaaaaattttttcttttctgagacggagtctcgctctgtcacccaggctggagtgcagtcgcgcgatctcggctcactgcaacctccacctctcgggttcaagcgattctcctgcctcagtctcccgagtagctaggattacaggcgtgggccaccatgcctggctaattaaaaatatatgtatttttaaactgtatagaggctggtgcctggaaagttgtattagcgagaaataatgtgtgattgtgataaactactaagatttagaagttgcttgttgctgaagcctagcctagccagactgtacacttcttttttattttttagcaacagggtcccaccctgtcactcaggctggagtgcaatggcatgatcatggctcactgcggcctcgagctcttgggctcaagccatcctctcacctcagtctcccaagtatctgggactacaggcatgtgccaccatgcctggcctttttttttttttttttttttttttttttttttttttttactttttgtagagatggggtcttgctatgttgccctggtctcgaactgctgagctcaagctcaatcttcctgccttggcttcccaaagtgctgggattacaggtgtgggccaccatgcctggtctagacttcttatgtgaacaaagcgtttgtttagaaatctgtgatggttttatttattttgagacagagtttcactctgtcacccaggctgcagtgcagtggcacgatcttggctcactgcaacctccgtctcctaggttcaagcgattttcctgtcagtgtcccatgtagctgggactacaggtatgcgctaccacacccagctaattttttttttttttgagatggacttttgctcttgttgcccaggctggagtgtagtggtgcaatctcagctcactgcaacctctgcctcccaggttcaagcaattctcctgcctcagcatcctgagtagctgggactacaggtaggcgccaccatacctagctaatttttatatttttagtagagatggggtttcaccatgttggccaggctggtctcgaactcctgacctcaagtgatccacccgcctcagcctcccaaagtgctggaattataggcgtgagcctccacacctggcagaaatctgtgatggttttacacggcttcgtgttaaatagaatttccccagatgctgactgccctccaataaagatgcctccaggatgcagcaagtgcctaaccaggtgagccctgccatacctatgacaacgttccttctgggagtaaagctggccagcagcaacccagaggagacaagcaggagccagctgctggtgggaaaaaggaaaaaggtcttgagaggctgtgcccaagggataatacctttatgaggtcacggtctggcccttggatttactgggttggaaactccatcttgacagcgacctgtaagtgaacaaaagtggagaggctgactcatgctttcacatagaaatgaaagataatggctaatgtttactgagcactggccatgtcaccagcatgtgccaaatccattcgtttattcatttactctataactattcaccgagtttcctgtttatgccagccactagggaaacagcagcaaaggaaacaacacagcccctgtcttcaggatgcgcacgttctggtgggggaagagacactaacaaacaaatgagcaaggaaccgctgaacaggtcagatggagaaagggctatggaggacaataaagtaccatagaagaaaacaggatgccacagaggttggtgggtcactattcacacagggtggccaaggagggcctcgcccagagggaggcatctgagcagagacccaaaggaaaccagggagcgagctgtcaatatctgggaaggagtcctcaggcagacaactttctatgcattatcctgtttagtctatacaacagcccaggacgcaggttccagaattatcaccacttcataggagagtgtggcatttgtattttccaaagcaggtcacatgactatttctggtcctgtgtgctctttggaaccttgtaacccctcctcccaggagtcagggtctctgttcctccccctttggatctcggcagagctgtgactgctcctaccaatagaggaccggcagcagtaaggccatgagacttcccaggctgggtcataaaaaacaacttgcacctggctggctcgctcaggatgctcacccatggaagccagtttccacggcatgaggcagcctaaagtagcccaggcagagaaaccacatggagaggctcaggtggagaggaactgaggcccctggccaacagccaccatcagctgctgggtgagtgggcaagtcctcagaccacttaaaccccagccttcaagtcttcctgctaaggcacaggcactggggagcagaaacaggccacctcactgtgctcactctgaattcctggcccataggatccatgggcacaagaaatggtggttctacaccagtgaattgtgggacgatttgttctctagacatagtaaccgggacagggagtccctgctgcacagagaggtcaagtcactcacttaagacggttctcatttcatgacagttcagtatgtgcagaccactgtgctaagttctcggcaggtattatctacagaaccttcccaatcacccttttcaaggtaagaatgatttcccctttggggagatgagaagcagaggctcagagagcaaatgacttgcccagggccacaaacctcttaagcggcgagccagacacatgattttgtttaatctttccctccactctatgaggtagggatgattatcccatctttgaaacctacaaaatgatgctcaaagggtgacaattctccttcccccagacctgactccactcacctagaaaacagtggggacgcagctgaaatccagaacccaaaagcccatgttcttcacctggtgccaatttatacaacgaaaacgcaaaaccggactgggttcttggggcagcaggtcagaacattcttgtagatttaaatctggaagctgatgttgggtgtggaaccacggcaagagagtcttttaaccatgtgccacccccggttctgacaccgtcaccagcctggtctaggccaccatctctcccttgtgctactgcagcagcctcctaactagactttcggcttctacgcttgtccctacaatctattttcaacccagtagcttgacggatccacttaaaatctaagtcagaccctgtctgtgtccctgccctggcccatatggtgggtcggacacggtggctcacgcctgtgatcccagcactttgggaggccgaggtgggcggatcacgtgaggttaggagttccagaccagcctggacaacatggtgaaaccccgtctctactaaaaaagtacaaaaaaaaaaatcagccgggcgtggtggtgggcacccgtaatcccagctacttgggaggctgaggcgcaagagtcgcttgaacctgggaggcagaggttgcaatgagccaagattgcaccgctgcactccagcctgggcaacagagcaagactcagtctcataaataaacaaataaataaataaaatgtaagtcagaccctgtccctcctctactcaaaaccgtatggtggatttcattttagacagaataaatgctgaaattcctaccatggcccaggagccccctgtatgatctgccacttccctgttccctctctgacctctcccacctctccccttgctcacgctgagtcagccacaacagcttcggtgcttttccccaatcgtgacaagaacgtttcttccccaagacctttgcacctgctctcccatctgcctggaacgctgtccccctaagagtgcacacagttaacttcctcatcacattctttagctctctgttcaaatgtcaccttctcagagaccttcttggacacgattttactgtgttttttcttttcttttttttgagatggagtttggctcttttcgcccaggctggagtgcaatggcacgatctcggcttactgcaaactctgcctcccgagttcaagtgattctcctgcctcagcctcccatgtagttgggattacagatgcgtgtcaccacgcctggctaattttatatttttagtagagatggggtttcaccatgttggccaggctggtcttaaactcctgacctcaggtgatccccctcagcctcccaaagtcctgggattacaggctcgagccaccgtgcctggccctggacaccattttactaatagcatgttttatcctccttaccttgctttatttttcttcacagtgcttgtcactacctgacatactctgacttactagaatgtaagcttcatgatggcggggacttttccctgccttgtttgccacagtgtgcccagagcctcaaacaggcctggcacagagcaaatgctgggtctacgtctgctgagtgaataaatcattgtctcctttgcaaaagaaaatgtgccaagaaggtgggtggggggggtccccagctgtgtcagtacacattcatctctcaggcaaatctagacatccagccagagactcaaagctcagggccggaattatctagctggatggtccctaaaaaagacgtgccacttagaagcagatcagtacaggggttaagaggataaacttgggaaataatctgcctgggtttggatcttgcttctgccatgtattgcatgatggacagagttttgctatgtcacccaggttggagagcagtggcacgacctcagctcacttgcaacctccgcttcctgggttcaagcgattctccctgcctcaacctcccgagtagctgggattacaggcgcatgccaccatgcccggctaatttttttatttttagtagagatggggtttcaccatgttggccaggctggtctcgaactcctgaacccaggtgatccgcccacctcggtctcctaaagtgctgggactacaggcgggagccaccgtgcccagccaaattttttggattttagaacctattacatattacaacaccggcgagatccaggggcaactctccataagtatatgatttgcacaacaaaatctttaaaaattctaaatagtcacacatcagttcagagtgggtattgccagcaaacaagttcaaagccaggtgaggttggcctgccaagtaagttgcaaaacagagaaaaagacctttcagttttcagaacgttttggattttaaagttatagataagggactgcagacctgtaaatattctttaacatttcttttttagtgtctggcatccccaaccaccctgagaatgtgaattagctgggcaggatttttgttttagacactgctataataacctgggcttgaacagtgcctattagactagcaccgttcaaacccaggttatagtagtgtaatatcggttgcacggagccttccatatagtaaacgctcaataaaattggatgtgctgaagtcacctatgcaatggccaggtcaggacttgaaaccctaagactccaaccctcaggccagtctttatcttaatttatttgacttattcaacaaatgtttagggaacagctgctatgcgtcaactactgtatagtgttcctcctagaaagttcaggaaacagcacagcaaaaaggctaaaagtcagaccccacctcagcgcaggtggggcgattgcctaggcgacgacagagcctcccttcggccgcacctccatagaaaccacgggatgacttagacgccaagtttcacagcggaggagctgtcgaacttcccacaagttccgcccatctccgccttagccatgcccaacacggagcccaaggtggcttgggaagctcaagaggaggccagtgaaccccgcgacccggagccgctctcattccgaaccccgacagcaggggcctccgcctcccacaaacggtcgtgctgacgtcacggacgccccggccgagctgcggctagggggtcgggggacgtcccctcgttcgcctcgcttcccctcacctctgtacttggggactggggtgggattctgggcttctgcagcctgaccctcggatcctccgcagttacccggactcaccttctcagttgcccagcgaaaacttccgctgggcggagagcgctgcgcgcgcatcctgaatctgaggcgcccgcgcaggcgccgctgacttcctgacggcccctgggcttcgcctgcctgggaactccgtttcccagatgcctccgcggcaggcccgccctctgattccagacggaatggggattattccctcattgctcatccccctcccctccgttctagccgctttggaacgccttctggttctactgcgcatgtgtcagtgtcagaccaatcggaatgcaccgtgaggtacctctccaccaatcagaggtcacattacctaaacttctgcctcaactccgccccttacttccgcttgttttctcagaaacccgtcacaacgcgtttccatggcaacctaccgcttgctcttcggaaaaggttaacactccctgacttctagtaaaggcaagaagctaattagatgattctttaacaaggtaaaaatctggactacaaactgatgccgcctggtcctgattctctttctactctactcccacagtgctaaggctgaagaagcaggaggagatgggaaggcgaaagaagtcgcccgcacagccctctgggaaatagagtcctggcgctgccgcggaggatcctgggtgcagccgctcagagaagcttctcgcgcacaggaagtcgctgcgaggaggcgcgtgtgcggggagttgaatctcccgctcccttgaggctggggttgcgtctgttgacgcggccgactacaatcccgaggtacggagacgctggggctgagggacttgcgggctcggtccttcctgagaggtgacggaatgcaagtgggggcgacttcggcaaagggtgcgtcgccttgggcggcggttgtcagggtgaaggtgtgaaccgtctttcacagtctgttatgaaaaccgctcaaggtctgggcacggtagatcacgcctgtaatcccagcactttgggaagccttggcgggggggatcacttacagccaggagttcctcgaacccccagtctctactaaaaatacaaaaattagttgagcgtggtggcgggggcctgtaatcccagctactcaggaggctgaggcaggagaatcgcttgaacccaggagctggaggttgcagtgagccgagatcgcgccattgcactccagcctgggtgacagagcgagactacatcttaaaaaaaaaaaaaaaaaaagaaaggaagaaaaccaccttgggaggctgaggtgggcggatcgcttgagcccaggatttcgaggctagcctgggccagatggtgaagccctgtctccacaaaagaagaaaaaaatagaaaaattagccgggcgtggtggtgcgcccctgtattcctagctaattgggaggccgaggtgggaggattgcttgaacccaggaggcagaggttgcagtgagctgagaaagaaaagaaaagaaaagaaaactgctaaaggggtttccaggcctccctgatggccctgagaggagtggttctgttttattttggttttggttggggaaggaggggaatgagttacctgaagttggcaaatttaggcagaatcttgctggacgatggatgggagttcttcgggaagttgaagtacttaacatttacagtatttgagtgctttctgtgtgccaggcgccctgctggagttgcatttcctcttctgatccccgcagcagcactgagacataagtgcaggtccccttggcaccaaggcaatctcgggaatcagaatttttcagattttagaaagctaatagggtgcatattttataattaggcagcacccccccacaccccgaggaatctgggccagtttttggtcataaaatgtttctgtggggcaaggtgtgaatattcacacttatgagaacattaagaccctacatggcctgtggcaatccaggtgaagttttgcggtcagtttataaatcaagttctggtttttggagcatttaaaggaccatagatctgttgtatttgttccatttggtacatgtggaaactaaggcttagagaaggtaaatggtctggaaggaagggcaagactcttgggcccaaggtctctcagcctgataattgtttggcttaagtcactctgggctggatgaccttgggctccacctctgggccctcgtttctttcctcccagagctgagagtatatgagatgtgggcagaatgtgatttggtaactgcagacagggatctcaagctcagctgtctgtgagggccaggcagatgacatacaggaaagaagagaactggtccaggtgaggctgcggggccttggggagcacttgcctcatctgaaggggagaattgtgttttttttttgatgacagagtctcgctctgtcacccaggctggagttcggtctcactggaacctccacctccccggttgaagcgattctcctgcctcagcctcccaagcagctggaattacaggcgtgcaccaccatgcctggctaatttctgtatttttggtagatacgggggtttcaccatgttgatcaggctggtcttggactccaaacttcaggtgatccgcctgccttggcctcccaaagtgctgggatggcaggcatgagccactgcacccagccgctttttaaacttaaatttaatttttttggccgggtgtggtggctcatgcctgtaatcccagcactttggaaggccgaggtgggtggatcacgaggtcaggagatcgagaccatcctggctaacacggtgaaactccgtctctactaaaaatacaaaaaattctccgggcgtggtggcaggcgcttgtagtcccagctactcaggaggctgaggcaggagaatggcatgagcccgggaggcagagcttgcagcgagctgagatcgcgccactgcactccagcctgggcgacagaacgagactccgtctcaaaaaaaaaaaaaaaaacaaatttaatttttttttggaggcaggatctttctctgtcattcaggctggagtacagtgacacaatcatagctcactgcagccttgaactcctgggctcaagtgatcctcctacctcagcctcccaagcgatcctcctacctcagtctcccaagtagttgggactacaggcacgtgccaccacaacttgctcatttttaattttttttttttagaaacaaggtcttgttacgttgcccaggctggtctcgaacacctttcagcctcccaaagtgctgggattataagcatcccccacttgcctagcactggtgggggagctttaaatgggcaccagtgaactaacttcgtgggatgtagacccaatgttgccaaatcctaggatgtttcagaagttggaaacataatttttaggtgaaatttcccaattttcaagtttgagactagtgagccatgcttgaattttctttcaaaacattctgtctgccaacaaacattatgggccaaatatctgtcaactgagttatactcgtaggttgaggcttaacctctgacatgtagaaaaactcattgttcagtagaattagcatttattgtaggtctaccatattcccatatttgtagtctcaaaaatctggacaactcagaacaacaaattttttttcataaatttagtgtccgtgccttacctgaactactacagggtattttttaaatataactttaaattattctacctagaatgaacgatgatacttttctctagggtaaagtgttcaattatgaaatgcagcctgatccacactgcgctgggactttgttttgttttgtttttgtttttgtttttgagacggagtctcgctctgtcgcccaggctggagtgcatggcgccatctcggctcactgcaagctccacctcccgggttcacaccattctctcgcctcagcctcctgagtaactgggactacaggcgcccaccaccatgcctggctaattttgttattgtatttttagtagagacggggtttcaccgcgttagccaggatggtctggatctcctgacctcgtgatccgcctgccttggcctcccaaagtgctgggattacaggcatgagccactgcggccagccctgcactgggattttaatgaaatatgccatgtatatgccatatcaccttttgaaaataaaagttgaatttcaaagcacatctggccttggagtttgaagaatttgtggacctgtgtcattgttaagtgatccgtgctgctttgtgatatgaaatgctttcagcactccgcagatatgtgctacttggtccacgcagtggatacaaatgggtaaaaatgtctgtggtacagttttgcgtattatgggtcatgaaaataactaggtgggcagtgactatgattttttaatgaagtagaataaaagagactagaatagaaaacatcccagtgcatcttacattgcagggtaagtattgcttcatgaagcttttgtttagttacactgtgtgtttgagtagtcatgatactttttttttttcttttttgagatggagtctcactgtgttgcccaggctggagtgcggtggcaccatctcggttcactgcagcctctgcctcccgggttcaagtgattctttgcctcagccttccgagtagctgggatcacaggcacgtcccaccaagcccagctaatttttgtattcttagtacagacggggtttcagcatattggccaggctggtcttgaactcctgacctcaagtaatctgcccacctcggcctcccaaagtactgagattacaggcgtgagctactgtgcctggcctattctacatattggtggtgttactgtgggtcacggttaaaacaaaagttgaaatatttctgttgtagagatagtggccaggtgcggtggctcacaactgtaatcccagcactttgggtggcccacgagggcggcttacttgaggtcaggagtttgagaacaacttgggcaacaagtgagatcctgtccctacaaaaagtgaaaaagattagctggatgtggtggcacatgcttgtagtcccagctgcttgagaggctgaggttggaggattgcttaagcccaggaaattacagctgcagtggcccatgattgtgccactgtagtactccagcctggcaacagagcaagaccgtgtctccaaaaaagagtaacagtttcggaggccaatttacctgaactcaaattccagagatgataatcagaaatcccagaagcattgttccattggttctttagacaccttcgttctgtcaacaactgtaggtacttttacacctactgttaaagcacctactgcgtactaggcaccatgctggtgctaagacacagcagtgagcaagacagaagctcccactgtggccatagactttcatcaccaaatctcctaaacatgtgctgactgactgttaggtgctaacccaccattgttggtggcgaagctgttctgtaggttctgaagcacagtgcaaatgtggggctgaggtggcttcagtaaatatagttgttgttgtcccctgcagggagactcacattgggacttgtcctcctcctcctggacattttgggggctcgtcagcatggacagcgagtcagccatgggtggaagggaggctttctcacagctcccttgtgcttcccacagccctgccagccgggaacacggaggggaaggaggaggagcttaaaagaggctactgaaccccagttggccatggctgaggtgagttgaaggtcgctctgtcctaatcggtcacacccaaaggcagaaaaattggccttcctttgtggccgaggcgagttgaaggtcgctctgtgttgattggtcacccccatggcaggaaagctggccttcctttgttttggcctccctgtcccatggtggctcccaggcgatcttttttaaaggaaagctcgcatgctgttctttcctgtttgtactcttctgggaacccctattgcttatagaataaattccaggtttttcagccttcctgtgtgttctggcttctaccctctttgcaccatcttctgtcatttctctagataacaaatactccctttggcctagtagtaaaagttgattctgtactttccagcagcttcctttgctcaggttgggccctctgctggaattccctgccccttttccatgtggtagtgtctcacacagcctttaagacccggctcagttcccccacccttccctaggcagtcagcactttcctgctctagccttccatagtaccccctgctgcctccactgtagcacagatccacctagatatggatgttcctgcccatatctgtcagccccaccagactagatgctccttggggacaggaactgatggggattcatctctgggtccccagggcccagcacaggccaggaacacaggaagcctcatgaggtgttagttgaatgaatgaatgaatcaatgaatgatgcatgaaaccatctctctatctggtaaatatctgttcatccttagtgatccaacttgaatgaccttccctccaggaagctttccctgacctcaaggcaatggcctccctctcccccttggcccacacagtccccgatacctccctttgccacagtcctacctccctcgtgtctctccgtcagaccatgagctccatgaggccaggaaacaggtctgacacacgtccatgtccccagtgcccacaatgtggtctagcacacagggtaaatgattgccaaatatgtgctctgaccttgtcactttcctgtggctccccagtgcctcaaggatctagtctgccccgtcttcccacctccttcatcactgtgacaggggccttgtccagcgcagtctgggagtgtgaggaaaggaagcccctcaaaggtcctctttgatctggctcctgcttggctgctactcttgacaggatatagacagcaacagtttctgttataagtaccagaaattgacttacgcagtcaggagactattaattatataaccaaaagtccagaggtagggctgtcatgatctgcaggtgtgactgggactcagtttattgtccccatcttgaacctcacttagtatgggttccatccttcatgagctccttcccttgtcccaaaacagctatcaggaccatgtgctgctttgcctcattcaacaagtatttactctgtgcctgtcatgagtgggctttgttgtaagtctggactagggaaacggtttaggtggttcctgccctcatgaagcttactttattgcgggtgacagtgtatgagcttgctagggctgctgtaacaaagtaccacacactgggtggctgaaaacaacagaaattggtggtctcccagtcttggaggccagaagtctaagatcagggtgttggcagggctggatccttctgaggctgtgagccaggcctctcccctgtgttctggcagatggtggccagctttggtgttcctcggcctggagaggcatcacctcaatctctgccttcatcttcacaggatgtcctccctgtatcttcacattgtcttccctcagcctgtgtttgtctttgtgtccccatttctcctttttataacaacttcagtcgttttggattaggacccaccctgatgacctcatctcagcttgatcacctctgtaaagaccccatttccaaataagggcaaattctgaggtactgggggttagaacttcattgtatctttttagagggttacagttcaacccataccacacagtaaaatgcattaagtaaatcccatagaatgcaggcagtattaaggattatggaggaaagggatagggaggcccagggtagatttgctgttttatacagaggggtgggagaaggcttcatggagaagaggcatttcagcagagaactgagggacacaatcttggctctaagatggggtctggcaggtgtgttcagggagctgcaaggaagctggtgtggctggagcagagtggatgagcaggaaagggggagaaggtgagccctgagtggcagctggggccagatctttagggccctggagatcattgtatggtctctgtctttaaatatggtgaatccggaggccgttggagggtttggagcagaggagggacaggatttgttgtaagcggaaacaggatcccccttgctcgtccacccaattcctgcttagcatcaccactgggacgactgtttcagggtcttactgctgctgtaacaaataatacaaacttgtgggcttaaaaacaacacaaatttattcttttacagttcttcaggtctgaatcccaaaatgatctcacggggctcaaaccaaggtgtcagcagggtgcgttccttctggaggccctagggaagaattcagtccttgcctctcccagcttctggaggctgcctatattcattggctcctggccgcatcactctaatctctgcttctgtcatggcatcacctcttttctcctgtgattccttgtctccctcttattaggatccttgtgatgacatttaggaccaacccagataatctaggataatctccccatttccagattcttaatcacagctgcaaagtccctttcgccatgtaagataatattcatgggttctgggaattaagacagggacatctttgtgtggggtggcggcattattcggccatgacaatctacaggatatctcaaactttacatgtcccaaaccaaactcagactctgtcctgaaagctgcttctcctatgtctcagtaagtggcaactttgtccttccagctgttcaggctaaaaacgtagagccatcccagggtcttctgtctttcacaccctccatgttattcgtcaggaaaccttgtcagcaccgttatctgaatatctggaatctcaccacttctcaccccctccattgctgccaccatttctcacctggattatcaaactggcctttttcctttgactccctgcttctgcccttctcaccttctgtcttttcccacgaagcagcaagaggaggatgctgtttagtatatgcctaatttaaaaaagtttttttattgtaaaatcacaggtgcagaaatgcacacacatcaaatgcatgacctaatgaaggcgaacgccacctagatcaagagtgagaattttttttgccatccaccccagaagtccttcgtgggctctgtcatagccctctcgcatccccaataagtaacctgatttttatgattaccacttgctttattactcaaatgcacaatcccttgccccttcttgttttttaatgtcttctgtgtctcttaatctttgggttcctcctccatccccttctgttctcagctgttagttagagaacagttattcggtcctttgaggaactggcatggttcgacctgtagaattcctcagtctgttttctctggttccatccttgtggtgcagttgagtttattcccagttggcagctaggtccagaggcttgattagactcatggtcaatccttttaccaagaatctcttgtgccccctgtttgtggtcctggcagatagtgatgctttctgccttatcacctgttcattcatcagggcttgcaaaatggcgctatcatttcttttcatgtattagttggaacactttacaagacatcctttggctgggcatggtggctcatgcctgtaatcccagaactttggaaggctgaggtgggcaaattgcttgagctcaggagttcaagatcagcctgggcaacgtggtgaaaccccatctctacaaaaaatttaaaaattagccaggtgtggtggtgtgcacctgtagtcccagctactcaggaggctgaggtgagagtatcacaggagcccaagaaggttgaggctacagtgagctgtgatagcaccactgcactccagcctgggtgacagtgagaccctatctcaaaaaaaaaaaaatttatctactatttgtctagtcgacggtagagttcatataggacaggtagggtaaatgcttgactctccttttatttgctagttttcactataaggaattggtttccttctgtcatgtcatccttcagaggtgaccagttctttcatacgtgtgtgtgtgtgtgtgtgtgtgtgtgtgtgtgtgtgtttggctgttcttaagagttttacaaagcattttcattgtaattcaatgtaacacacccaggttaaatctcataaggacaggaactggctgcccccttttttcctgtacctagcacaggggctggctcgtagtaggtgcttggtcatcattggacagataagtagacaacaagcaccacttatttagcagcttcttagtgagttgggtctctgctgagccctgtgtaggcatcagctcacttcatcctatagcagccttattttagagaagaggcaggctgagcattagagaggtggactaacaaggtcccacagttaatagatagtagaactagaatttgaactgggacctgtctgactctaaagctgagcctctaacaggtcagcctcctggggattgtgtagcagatgggagctcgtgccaccccaccacctactcaccgtgtgctgtggttggaatgtttgtcccctttgaaactcttttttttttgagagggagactctgttttctaggctggagtgcagtggtgtgatcttggcttgtggaacctccatctcctgggctcaagtgatcctcctacctcagcctcccgagtagctgggactacaggtgtgcactaccacgcccagctaatctttttgtgtttttggtagagatgggggttttaccatgttgcccaggctcatctcaaactcctgagctcaagcagtctgcccgcctcagcctctcaaagtgctggaattacaggcatgagccaccatgccccaccaatcgaaactccttgaaatttaatccctaatgtagctgtattaagaggtggggcctttttttttttttttttgagatggagtctcactctgtcacccaggctggagtgcagtggcgcaatcctggctcactgcaagctctgcttcccaggttcatgccattctcctgcctcagcctcccgagtagctgggactacaggtgcccgccaccatgcccagctaatttttttttttttttttgcatttttagtagaggcggggtttcactgtgttagccaggatggtgtcgatctcctgacctcatgatccgcctgccttggcctcccaaagtgctgggattacaggtttgagccactgcgcccggccaaggtggggcctttaagagatgattaggtcatgaaggctctgcctgtgtgagtgaattcatttattcatggaataatgggttatcatgagagtgggtctgttgtaaaagccagcttgacattgcttcagttccctcaccatgttatgcgttgtgccattttagggctctgtagagtctccaccagcaggacgaccctcaccagaggcagtctgttggccttggacttcccagcctcgagaactataggaaacaaatttcttttctttataaattacccagttatagcaacagaagatggactaatacactgtgtaacttggagaaagtgactatttgggccttgattttgttttctataagttggggataatcctgcctcaaagaggagtcaggcagttcagtgactcactgcacctaaagcattgaaccattgccggcatgcagaaagctgttggccaaagaagggcttttgcagtcagatgcctggagggttgggatgggcagtgtaagccagagtggaattgcccctttgtcgagctcttcctgtgtgctaagtactatgcagtcacctcccagcagtatttcagttgcttcttgtagcagccctgatgagatgggactcgttggtcccatttcactaggggagcaggaattggggtcacaagagacatgcagcttacttgccaatagtcactcataaagggaaggtaatagggccatacctcagacccaaactaaagagaggtggttttcattctttcttaaaatgtgcctgtgcccacactgatggagatttggaagagacacatcagtcatggtttcacctagagatggggtgtgtgggggcaggctttcacgttttaatgttggtacttctcaagtatttgaatttttatcctaaacatccattaactgtccaggtacagtggctcatgcctgtaatcccaacacttcaggaggcaggggcaggagaatcacttgaggccaagagttcgagaccagcctgggcaacatggcaagactcctactctaccaaaaaaaaaaaaaattagctgggtctggtggcacaagcctgtagtcctagctacttggaagctgaggcaggaggattgcttgagcccaggaggtggaggctatgatcgtggcactgcactccagcctgggcaacagagtgagacactctctctctctctcgctcgctctctctctctgtatatataatatatataatttatggattaccagatttataaattaccataacttacaaacgacagaaggaaaccaattccttatagtgaaaactggcaaataaaaggagagtcaagcatttaccctacctgtcctatacgaactctaccgctgactagccaaatagtagaaaatttttttttttttttttgagacagggtctcactgtcccccagggtggagtgcagtggtgcgatcacagctcactgtagcctcgacctccttgggctcctgtgatactctcacctcagcctcctgagtagctgggactacaggtgcatatataaattataaattataattttataaatttataaatttataaattatatatataattatatataaaataaaatttaatatatacatgcacacacacataaataataataaacacttattaactaggaaagtcttaaaatgaaagatggcatcactaaaagttggacaaccagataggagccttgggtaaccatgtgttacccaagcggacctggtacctaaagcggacctggtaccacctgtgagtgggtctttcccccagaagctgtattgactccagtcaggcctctgctctcctgaccagctcacaggaaatgcgtggccagggagcagccaggtgacactgcatggaagcagcttgccacactcagaacatgggacctcaaatcaggagcatggaggatgtagaaggcacagcggtacagctgtagatttcaaaacctcagaaccacatcagttacagggtatgggccccctggattctgattgagacgagctagctataaagacacaccactgagatgtcagactaatctgtatacagattttgaatgtggtctaggtgttcagtgattaaggagttactgttcatactgaagtattcacaggtgaaatcagatgacccctgggtgatgagttcatgggtgttaattatatacatctctacttgtatgtatgtttgaaagtttacaaaataagtcttgaatgaacacttaaagcaaaagcgtaaaatagatttttaggatcaggcagacctgggttcagtcccacctgtgttaacttcggttgacatcctgtcccctggtcaaagtcaaggtccttttctttgcctacaaaatacaggggtttccagtctcttacatctcaagattcttgtgaggctgaggatgggatggtttttgccaaagccctggcagattgagggctgggagtgccctgagtgagctgttgggctcctccctgaccccagcctctgagtgaccaatagtgtactgtgtttcaggaatttgtgaccctcaaggatgtcggcatggacttcaccttgggagactgggagcagctcgggctggaacagggggacacgttctgggacacagcgttggacaattgccaggacctcttcctgctgggtgagtgttgcctgtccccaggggcctactcactgccctgcttggtgatcacccatgctctctaccacccacagggtgaagtcctggctcctgggctcctcagaatcagcatgacctagcccagcagttctcagctggccgaggagacattggcaatgtgtggagacatttttgattgttactccttgggccagcgcagcgtgccgctagcatctagctggtggaaccaagggaggctgccacacatcctacagtgcacagcacagccccacaaccaaggattggcccacgccagtgtcagtagtgctaagcctgggaaaccctgctctggcccctatctgcctccccagccttgtcttcaccactttcctacttgtagtcagtcattcttcaagctgatacttcaaagtcttccagttgccctcccctctgcctaagcggctctcagggcttacatttttaaagtttaacctgggaccctgttagaactccatacctcctctcctactcatcttgtctgtcgctccctcacgttctaactaccattgtatcattcagagcgggagctgtgtgaggacagggcgtgtccccagtgtttggaacgaacagtacctgctctagggcccagcagacagctctaaactaatgaatgattgagtagcagctcttaggacttgcttgttcaatcctccagtcaccccatgaagaagctgggttgtccctcttttgccgattggtctgaaactgaggttaaaagagtggcagtcaccttcccagctgtgtcagtgtccccaggagcacccacagattcagtgattggctaggattcccaggactcatcctgtagtcagactcatggctatgacttactacagtgaaaagattcagagcacagtcagcaaagggaggaggtacatggggcaaagtccaaggaagccaggcacaagcttccagaattctctcaggggagtcacatgggacatgcttaattcccccagcaatactgtagaatgtgatatcgcgtgtgaaatgctgtccaccagggaagctcatcagagactcagtgccagggtttttactgggggctggtcatgtgggctcctctgcctggcacattccaaaattccagccccccagaaggaaagcaggtgtaagccaccgtgtttgcacagtttaggtccagggagcgtgtctcttcagttctggagacacggggtacccccctgaaatccagccttgccagcaggcttttcccaggagagcagccagcctgctgtgtcgccctcttctgcacaccagtgtcacacagtgagacagcagcagggcccagactccagctaaggtctgtgcagctccaaggccatatcaccccagctccccatcagtgtcacctgattaactcattttccctctctgttgcctcagttctttctttttgaagaaccagaaaaataatttactccaaaagatgaaagaagtaaaagataacacacggtggaaactatcatttgatagaatctcatcacattggggcagactttctccagactggccagtgtgtgctaagaagcatctcgtgggaggtcctacctcagtgtctttttgaatttttaaactacagcccacagtaagaagtgtgtttacctcgactgccccttcacccatttgtgtgaatgtatgagtagtgtatccgtttcctattgctgctgttacacataccacaaacacagtggcttccaccagcacacttttattatgttacagtcctggaggccaggagttccaaatgcatgtggctgggctggaggcgaggtgttggcagggccaccatgttccttctggaggctccagcacgtagatagtccttcctggcccgttgccagcttctggaggtcacctgtattgcttgactcatggcttctcagtcttcaaagacagcagtggcgttttctccgctgtggcctgtatccctcctggatggtgactctgttcccttccttggggaagcttgtggagggtatggctcaggactgcttgggctctgggaccctgacattttctgtccctggcccatggaggcctcaggcaatgtgtggcccatgggtcagtgaataaatcatgaatggctaaggaagtacgtgcctctccacctggcagatcctgcccattaaagagctgtcacaagtcctttgtatccccagccccagctgtcacagctttgatcaccctggattgtgattgtttggctccctctccatcactggactgggaaccctacaggacaggcatccccagagtcgcccagtgcagcacctcgtccacacacaggagccacgtgcaggataaagcatagaaaagtcaggagagccaggaggttctcactgagtgtctggatggtcctccatgtcctggttgggtgacaatgcttttctctccctgcagaccccccaagacccaacctgacctcccacccagatggcagtgaagatctggagcctctggcaggaggaagcccagaagcaacaagccctggtgagtggatggagaggggccccttgtgtaccttctgtcttccagacctccatcctgaggctgcagccagctttcccacaggtctaccgagacattacaacgctcagcttcaggacttcactctgcttctcgctggcttccatccccttgtcctgggagctggggggatcaggacatttttatagaccctcactctggggtctctctaccttgcccttcagcacagggttatcctggtgcctctccacagctcctcctctttccttccagactcaacaagggtacgccctccactctctcagttggtctctctactttcctgccttgtgctccctgagtgtgttgaccctcattctacttcttttacctcctttccttcaggcccatttttccttcctatccctggggcatagcagatggccacatcagggagtaacttaagcccaggcctgaatgctgccaagagcatctgccctgccatctcccaagccggggttcctccaggtggatcaggttaggtggtgaggattcctggggtattacccatggtagagacgtccccagcatgagaagcagggccctgaaccagagaccacaggaatctcaggctgtaccccatccagtcagtctgcagctcccttcttggctcaccacgctcaggctcgtgtacatgaggcctctgcagcctcctcttcagcacatcagtgttcctcataggtgactaactcatgcacaggctctcacaacttctgctttctgtttctgtcacctcagcatattggctgtttccaaacataggtagccatgcctttactaacaaatatacctccatatcctctagtagtgacacttgagttgcatagttaccacataagcgtctttcccctttaacagcatgccgctcttggaagcagggcttagctgattcaccctgtattcccagctcctgacatcatgcttggcatataaggggtgcctattacatgtctgttggtgcatttgaggccgagggaacaacatgagcacaagtgtggtgaggagagtgagctggatatctgtgggagagatgagcagaggcaaaggtgacaattcagaacaagatgtggtttcagaaggctttcatttgcaagttttaattccaggcagagagactttaagcagtctcatagatactcagatggtgagccaagaactgcacaagggacaggctggaaaaggtatgatgatggaggagaggagagatggggagactggaggcatacagcagagcagtgacattcatgttttgtgaaggatcccagagagcatacagcttggtagttaagaatatgggggccaggcgtggtggctcatacctgtaatcccagcactttgggagggcgaggcaggccggtcacttgaggtcaggagttcgagaccagcctggccaacatgctgaaactctgtctctactaaaaatacaaaaattagctgggcgtggtggagggcacctgcagtcccagctactcgggaggctgaggcaggagaatcacttgaacccaggaggcagaggttgcgttgagctgagatcgtgcagcacttcagcctgggcaacagggcaagactcagtctccaaaaaaaaaaaaaaaaatatatatatatatatatatatatatagtcagaggggttcaaatcctcagtcttctgctcacttacctgtaagaaagcagaaacgtgcctaccttacaggaggttgtcgagtgtaacagagtgcctgaggcactcctgcctgtgaacaagcataccatgaatgggaattactctgtcctgtgaatctttctcgtggccgcctctgtggcagtggatggatgagcagtggaaggtccccattaaagaacttaccttctggtaagggtcaggggtcagaccctttcataacctgttatggtagaggatggtcagtgctcagctggttttcagagaatacagggcaggggacttaaagcagaatggggatggggttgtcagggaagcctttcagagaagggtgataagctgggtattaaaagacttagaggagttagtccaggaagtgccatccagcatgagggaccattaaaggcacagaggagaaagtctggtggatttagggaaccgcaagagttctatgaggtcagcacaaagaacactgggctaatacactcatttcttttctccaggcaggaagccatggaagggtttaatcagaggagtgatatagtcagatccattaactacaaagccctttagggctagtgtggaagactagagagagagagagacagacaaacaggagaccaatgagcagcctggggtcagatgctgagtcagtgataaagagaggagaggaagggagttgagacatttcgatagagaccaaatgaaaatagtgccaagttgagggaggtagggaggaggttgactcccaggattctagcatggagaactggatggatggtggtgtggggagagcggggtgttgtctgggatagaggatgcaggatatgaggaggaagattttggtgacagtacaggatagagtggagagtagaagcaggtgagtccaggcgattttttagggaacttggtcagtcacttaggtgtgaaggtaatggtagaatctccctcctcgttgaaccctatggtttcccaactcccttcttgaccctcctgggaatgggctctgtctgttttctgtgatgccagttccacatgggtcacccctttgggtcccttgatggataggctggactcaagatctatcacccctacttgctcttgtctgtgttctcacccttagtgaacaggagacatttgcacttgctctttcagatgtgactgagaccaagaactctcctctgatggaggatttcttcgaagaaggattctcccaggagattatagagatgttatccaaggatggcttctggaactccaatttcggagaagcctgtatagaggacacctggttagatagtttgctaggcgatccagaaagtcttctgaggtctgatattgccaccaacggggaaagtcccacggaatgcaagagtcatgaattaaagagaggactcagtcctgtgtccaccgtttccacgggagaagattccatggtgcataatgtttctgaaaagaccctcacaccagctaagtctaaggaatataggggtgagtttttctcctactccgaccacagccagcaggattctgttcaggaaggggagaaaccatatcaatgtagtgaatgtgggaaaagcttcagtgggagttaccgtcttacccagcactggatcactcatactagggagaaacccactgtccatcaagagtgtgagcaaggttttgaccggaatgcttccctttctgtgtatccgaaaactcacacgggctacaaattctatgtgtgtaatgaatatgggacaacttttagtcagagtacatacctgtggcatcagaaaactcacactggagaaaaaccatgtaagagtcaagatagtgaccacccacccagtcatgacacacagcctggtgagcatcagaaaactcacacagatagtaagtcctacaactgtaacgaatgcggcaaggcttttacccggatcttccaccttactcggcaccagaagatccacactcggaaacgctatgagtgttccaagtgccaggcgaccttcaacttgagaaaacacctcatccaacatcagaaaactcacgctgcaaaaactacctctgagtgtcaggagtgtgggaagatttttaggcacagttcgctgctcattgaacaccaggctcttcatgctggagaggagccttataagtgtaacgaacgtgggaaatccttcaggcataactctaccctaaagatccatcagagggttcacagtggagagaagccttacaaatgcagtgagtgtgggaaggccttccaccggcacactcaccttaatgaacatcggcgaattcatacaggctacagaccccacaaatgtcaggaatgcgtcaggagtttcagccggccctcacatctgatgcgacatcaggccattcacaccgcagaaaagccctatagctgtgctgaatgcaaggagactttcagcgataacaatcgccttgtgcaacaccagaaaatgcacactgtcaaaaccccatatgaatgtcaggagtgcggagaacgcttcatttgcggctcaaccctgaagtgccacgagagtgttcacgccagagaaaaacaaggattttttgtgagtgggaagatcttggatcagaacccagaacagaaagagaagtgctttaagtgtaacaaatgtgagaaaacctttagctgcagcaaatacctaactcagcacgagaggattcacaccaggggagtgaagccctttgaatgtgaccagtgtgggaaagcctttggccaaagtactcggctcattcaccatcaaagaatccactctagagtgaggctgtataaatggggtgagcaagggaaagccatcagcagtgcctcccttatcaaacttcagtccttccacacaaaggagcacccttttaaatgtaacgaatgcggaaagaccttcagccacagtgcacacctctcaaaacatcagttaattcacgctggagagaatccctttaaatgtagtaagtgtgacagagtcttcacccagagaaactaccttgttcagcatgagcgaactcatgccagaaagaagccgttggtgtgtaacgaatgcgggaaaacgttccgtcagagctcatgcctttctaagcatcagagaattcactcaggtgagaagccctatgtatgtgattactgcgggaaggccttcggcctgagtgctgagcttgtccgccaccagagaattcacactggagaaaagccttatgtttgtcaggaatgcgggaaagccttcacccagagctcatgcctttctattcaccggagagttcacactggggagaagccctacagatgtggtgaatgtgggaaagcctttgcccagaaagcaaatctaacacagcaccagagaattcacacaggggagaagccttactcctgtaatgtgtgtggcaaagcttttgtcctcagtgcccatctcaaccagcacctgagagttcacacccaggagacactttatcagtgtcaacgttgccagaaagcctttcggtgccactcgagcctcagccgccatcagcgtgtacacaacaagcagcaatactgcctgtagccattgggtggcagcagagtcccagaatatgagaccgttactcggatgttgaaagttggaaactatcccattgcaagtttctctccaaataaatgcatctaaagattgattagaaagtttgtgcgcatgtttttcattataacaatgaaaacacaaaagtggagaagctgtacaacgtcaggattcagaggtaggctctggagccagtctaccttgagttaaatcccacctctgccatctactacctaagtgaccttgggaaggtcagaaaaatctctcagggcctcggtgtccttatctgtaaaatgggcatcacctacctcagagggcttttctgaggattaaataaataaatgtgaagcacttagaactgatggccagcacatgagggctcaccaagtgtaagccacaaatacacatcagctatagcacaaatatacttgtgttacaagaaaggaattagtaatctgtgtttactgtagttaatgttcttacaatgtatcgcttttaatttaagttttccttttttacagtttttctccagcactttactcttcttaagtgcctggccttttttgtccctttatctctcctggtttttttcttaagccccagaaagccaaaaagaacatgtaaactcttcacctcaactagctacaaccttccactcctaacctcccaagcttctcacttaaagaggactccctatcccacaaacacatgctccctcttcctatgaccttcctccatttaacagtgttggttatgcaataagacacccaatttttcatgggagttgacaccaaaacacagctggattccatcaggaaagctgcattgatcagggtgttaaccgcatatgaaacaacccatatggaagacatacttaggggtcaaacctgtggtgtgtggaagtgaccactgggatgtcatcattcaccatttatccaggatggccgctcaccaggcaatttgctaggctcgggggcgggtagtatccatacactatgcactactgctctgaagcttctggaatcagaaatgaacccattttcatcgacgattgctgttagttgacaagtgacatcttgaaaatgccacattccctcatgtcacaggaagttctgggatcaccaaggattgttggagagtccagtgagatggaaccacacaaccagttccctaccagtgtcttgtcagctctgggtgtttgttccctgccactaagtggctcagtcacacctttgctgaaacacagtagtcttatgaaaagcactggacacatactttgaatacctttcatattttaggtgctgaaaatggtgagggagtgagtgctctgcacccttgggcttttcaactcttgcacctggagttctgctggttaagtttgttaaacttagttgaaactgggaacctgttggctaaccattggggccttacactgtttttcaaatggttgcaacatttaacttctcgcacatggttcccgtcctctggagctctgtcttgtcggggagatgggcatgttgtataccaaaagagtgtacaaagtgttgcagggctgtgacacaatagggactctatggaaaactggcagccattgggtgtgggggcagtctgtaaatcagtcacctgtgttgctgcaggccaaggtagaaacgccctccgtgtgtgcatatttgttggttctctgattaaagttttgagtctaaaagcattggttccttctctcagcctgctgccatgcagccacgcatcagtccctgcctgccaggcctcacgtctttgctggggagggcttctggtggcgatcagtaagagggagcagctcagttttcccactgtctgggcggggcatgcgccactgaggaggcacacaagttcagctggtcctcagatgcatcatcaaacaacacttttcagtctgtgtgtgggcctaagtaaccaaggagagagcacaggcagcctgcagttcactcttcacagacatgtcaggccccaggcttggggagtgtttctaattagcatccagtaatacatataactttgtttatactttaatttttgtccccacctttttcctttagtgacaagtgacaagagatactagttcctgctcatggtagtaatagaaagttttttttttttataaactgagctgatagggccgagtgtggtggttcatgcctgtaatcccagcactttgggaggcctaggtgggaagatgacttgagcccaggagttcgagaccagcctcaacaacgtgatgaaaccctgtctctacgaaagaaatatgcaaattagctgggtagtggccactgatcacttaaaaatgattaaaatggcaaattttatgtatatttttacaatttaaaaacatttaaagtttaaatttagataaaagtttaagtttagataaatttaaaacattttaaagtttgtgtggtaggctgggtgtggtggctcatgcctgtaatcccagcactttgggaggctgaggtgggtggattgcttgagctcaggagtttgagaccagcctgggcagcatggtgaaatcctgtgtctacaaagaatacaaacagccgggtgtggtggtacacgcctgcagtcaagctactagggaggctgaagtgggagaatcgtgagcctgggaggttgaggctacagtaggctgtgatcatgccactgcactccagcttgggcgacagaacaagaccctgtctctgaataaaggaaaaagatgtgattggaaaaagaaatgagctacaggagcctaaaccaagcaaggctaagatggcaaaacccaacacctctgaggctgatgcaaagacaagctcaaacgaggtcaaggtataaagcagcagcaaagtcttctctagggccaaggtctcccccaacatttcagagatggggaccccttgtcggaactgataccccagctaaattccagcttgacttctggaagggctggagactaaggtcagtcagggtgatcagccctgtcaacataaccaaccccataaccctgggtaccacggcgtgggtgagcttctctggcaacactttgtgtgcggtcacacatcattgctgagtgcgttaaatgctttccatatgactttactggcagaggacacctggaagctcacgcttggtctctcctagactccatcctatgcaccttttcccattgctggttttaatctctattctttagctgtagtaaatgcaatcaagtataacagctttgctgagttttgtgagcccttctaatgaattactgaacttaagggtccactgccctctctgagcctcagtttcttcagtggactcaagaatgatactcagtgtaaggattctcaaaacgagcatcagcaggttccgcccacgccggcctcctgggttcagttctctaataaccacctcccttccccgcctactccagccaatccttgtgctgactcggctcctggccacgccctaaccccacccccgctgcctctaaacccgtccccacccctgcagcctcacaggctgccgtcagattctcaagcccctattcctctcggtggcctaaatccccaactgctcggggccacttttcaggccaaaatgggcccaaaatggggagggcaagtgatgaatgtcactagacagtggggccctcaaggacctggcaaatgggggcttggacctcggatcggcctcccacgcgaagcttgctccccaccagcatccccacgttggtggcgacgctgccccggccccacggatacttccgcgcctgtcagactccctgatgaactacccttcccagagtaccgcgggagctcgggctcctgagggcgacggtcctctgatggcagatgcgggagaaactctggcgtcaggcggccctcgcgtggagcacacgaagtcgtggcttattctggcttcagtatgtggggtggagaaggcgatccacgcagctgcgtctatttcctgtggatcaatcgcaaaatacgttctgtaagccccgcccccactgcgtgcgggcggcttttgtctccacggcaaccgtcaactctggaaacgcctgtctttctccatggcaactgtctacgccgcaggctggagctgcccattaccggagcccgtaagcagtatgggtgctggacaaacagcgtgatcgggtcgtaaaacttggtggaaaacgaatattagagcacaaggaaggaaaaaccgggctgggtgggactgaaatagttgatgtgagggaagatttctcaaagggagactatttttttattgtttgtttgttttttacttttattttttcaagacggggtctcgctctgttgcccaggctggagcacagtggcacgatctcggctcactgcaacctccgccttccgggttcaagcgattctcctgcctcagcctcccgagtggctgggattacaggcgcccgccaccatgcctggataatcttttgtatttttagtagtgtgaaaaatgggaaagttattcttcaaagattataaaaagtcacaatttcttagtataagattgctatccactattatatattccaaatcagctgtcctagcttgctccggcatgcctggacagaactagacaagccccaggacatagtgcatagttaaggaagcatccttaactatcccctgggcaacttccttttctttgttctgttccccttacccagttaaaaaagttttaaactaatagccaatcgggtaaagtgtaaaatgtgaggtcctattccagccaatggaaactggacacagcagtagggtagacacatcaggttataataactctgtctccttagtttggcggggtctcgtggctggacagctattgagtagcaccctttctgcaggaagtaaagctcaccttgctgagagatcatttgttcccgcattaattcttttttttttttttttttttttgcgacaccaaaaacctcgttcccaacagtaggggtttcaccatgctgcccaaggctggtcgccaactcctgacctcaggtgatccacctgcctccccctcaagtgctgggattataggcatgagccactgctcctgtcccatgaggcggcctttgaaaaaggctttgagggatgagcaggaggtcgccaggaagagaagggaaaatatactatatctatagatctggccaaaattaaaagtctcaacgagggtgtgaggaaactgccgttctcctaccctgctggtagggagaggaatgtcttcagcctttgaggaagtaaatcagtcagtcagttggtgatgtttgctgagaaccttactgtatactgggcagacgctagggatacagcggggaaagacagagggcaggcagtaaccatgagacatgattggaaattataagtgctgtgaagtaggctgggtgtggtggctcacacctgcaatcccagcactttgggaggccaaggcgagtggatcacttaaggccaggagttcgagaccagcctgggaaacatggtgaaaccccgtctctactaaaaagacaaaattagccaggcgtggtggcgggcgcctgtaatcccagttactcaggaggctgaggcaggggaatcacttgaacctggaaggcagaggttgtagtgagccgagatcacaccaccgcactccagcctgggccacagaatgagactctgtctcaaaaaaaaaaaaaaaaaaaaagtgctgtgaagtaaacaggcaggggctgagatgggaatgaaggagggactgtgggatcaagaaacataattctttgagaacataatgtgaaataatataaataatatcaacctcaagagaaatgtagaggaatactatgaattgcagctggaatctgccctaaatgtacatttcttcttcctggtgtttgtgacaatttgagttggggttttcttttagtcacagctgaaggcatcctgatgtgctagcataaacaagatgagtgtcttgcttttgatgcttttagctactcaagccagtaaattatcattcttgtttgaactgtgtgagaggtggtcaagttcaacatttgaagggagagttgagagatactgagtgggagagagggataggaaaaacatgccttctttctgtttaggtttctaaggtgataggagataagcctggagctgctcgtggtcaccttgccaccatggggggagaacctgccagaaaatgaaactaaccaaaaaggaagctgagctaagaggagtgaccagattactgacatgtctcttaaacacctggatccatctgttcctgaaggcaaaactgttcaattacataggctaataaattccctttcttccttaaacaaacagaatactcttggctggaaatgaatctctatcttataccagaaattatttaaaaatccagatggatcaacagccgggcacggtggctcacgcctgtaatcccagcactttgggaggtcgaggcaggcagatcacgaggtcaggagattgagaccatcctggctaacacggtgaaaccccatctctactaaaaatacaaaaaattagccgggcgtggtggcaggcacctgtagtcccagctacttggggggctgaggcaggagaatggcgtgaacccaggaggtggagcttgcagtgagccgagattgcgccactgcactccagcctgggtgacagagcgagactccgtctcaaaaaaaaaaaaaaatcctgatggatcaaagttttaattgtgaaaaaaatcgtaaaagtactagaataaaatatagcagaacttttttttcataatcttcggggtgaagaaggcctttgttagcatgatagtagatccaaaaactataaaggaaaatacagatagattaaaatacctaaaaatttaaaaactctgtataacaaacataaacaaaattgaagagaaactgggagaaaatattagtcacttatataccaaagtgttaatatgcgtaatatataaggacttgccgttataaatcaatacaaaaaggcttctcaattaaaaatgggcaaaatacataaataggcaattcacagaatagaaaacatcaataaatacataaaaagataatctcacaaccaagaggacatttttacctatcagattaaaattgctttaaaaaatgactaacaccaagtatttgggaaggaagtaaagaacagagaaataggcactcatatacacttccaggagttgtgcaaattgtttcaccccttttggaggactatttagaaataactatgaaaaatttaaatgtaggtgttctgtgatcccacaagtatacttgtaggaattcattttgtacatatgtcaaataataaatatccaatgatggaaaagaaaatgaaagcaacttaaatatccattaacagggattggttaaacaaattaaagaaaccctagcatgaaatattacacagctgtgaaaaatgaagatacctatgcatgtatatatttttgtgtaatatgtacaatatgtatatattttgcattatcatgggaaagtatccacattatatcaagtgagaaaagtaacttcttaaaattatgtttgcatgtggttatgccatatataccatacatatgtgaatatatatacatataaagtcagtttcataaaaacagaaagggagatttcttatttatagaaaaagtatgaaatctttggaatgaagttttttttttgagatggattttgctctcgttgcccaggctggagtgcaatggcacaatctcagctcactgcaacctctgtctcccagcttcaagcgattctcctacctcagcctcccaagtagctgagattacaggtatgtgccaccacacccagctaattttttatttttatttttagtagagacagagttttaccatgttaatcaggctggtctcgaactcctgacctcaggtgatccacatgcctcggcctcccaaagtgctgggattacaggcatgagccaccacactcggcctggaacaaagatttacagggcactaaagatttcttcatttttgtatcatctgagttattcacaatgaatattacttcaatcatgaaagaagccacaaaagattaggagaaatacctgggcgataactttaaaatataatagcacagaagaaggctagtgagacatagccccatatattgacagacgttccagctgatacagaacttctggcaacccattggcaacatactcgaggtcacagaaatcctctccctatgaccccatgacctcactgccaggatttcacctgggaaatagttagacactcatccctttcataaaagggatgttccatactatatatatataaaagtcaaaagcggccaggtgtggtggctcacgcctgtaatcccagcactttgggaggctgaggtgggtggatcacgaggtcaggagatcgagactatcctggttaacacagtgaaaccccgtctctactaaaaatacaaaaattagccgggcgtggtggtgggtgcctgttgtcccagctactcaggaggctgaggcaggagaatggcgtgaacctgggaggcggaggttacagtgagccgagattgcaccactgcactccagcctgggtgacagtgaaactccttctcaaaaaaaaaaaaaaaaaaaaaaaaagtcaaaagctagaaacaaccaaaatgtccaacaagggactggataatatgctggctgaatatatataagctacgtgaaactgcaaaatatcaggttgttaaaggtgacttaatgatatgttaaatagctgacactcattgctataaaaatgtagtgcatccatggtccgcatgcccagccatggcaggtaggttaagttcagccctttggaaagcaatatggcaacttgtgtgagtaatcaggaaaatggctggaaccttggttcccatcattgccactgtgggaattttactttgaggaataatcaccccaaagggagagaggaagtgagcacggacatgttcattataacattatttgtaattgggataactggtgaaaaacccatgtcagtcaaaagcttaaagaagaatctaaatggagaatggatttgtaaattacaccttctcagtggcatatcattatccttaataatgataaaagtgtatggggacaatgacaatgctcatggcataatgacggcaaaaacggtctctgcattgtgattacaatgaaataaacttatatttgtttaaaagatttgaaaggaaatataaaaaataaaaacaatatgacttctaaggatggccaaattgtcagcgatggcttttatgttttcaacccaaaatttctgacaactaaacctatggatatgggatatagatttaaaaaaccataaagaggccaggtgcggtggctcacgcctgtaatcccaacattttgggaggccaaggcgggtggatcacacaggagttcaagaccagcctggccaggatggtgaaaccccatctctactaaacctacaaaaattagccaggtgtgatggcaggtgcctataatcccagctacttgggaggctgaggcaggagaatcacttgaacctgggtggcagaggttgcagtgagccgagatcacaccactgcacttcagcctgggcgacagagtgagactttgtctcaaaaaacataaagaaacacacccaagaatgactggtgagtctctctgagctgcagaattacagggaatttgtcttttatttcatacttctttacactttccaaattatcctttatgataagcatatggtatttcactaaatttttttctgttataaaaatatatggccgggcacggtggctcatgcctgtaaatcccagcactttgggagactgaggtgggtggatcacgaggtcaggagttcgagaccagcttggccaatatggtgaaaccccatctctactaaaaatagaaaaattagctgggcatggtggtgcacacctgtagtcccatctacttggggggctgaggcagaagaattgcttgaatctgggaggcggaggttgcagtgagccgagatcttgccattgcactccagcctgggtgacagagcaagactctgtctcaaaaaaaaaaaaatatatatatataattattaaatgaaaaataatactatgttttaaaaatatgactaaaagtctccccttgggaggtggggcttacagtgagccaaggtcacgccactgcactccagcctgggcaacagattgagactctgtctcaaaaaaataataacaaaataaaaaatctccccttgggcgtgaataaacagtgatgcttaacaacatgacgcttaatagaacaatcactttgtaggccgggcacgggagctcacgcctgtaatctcaacactttgggaggctgacggaggaggatcacatgaggccaggtgtttgagaccagcctggccaacatggtgtaaccccacgtctactaaaaataacaaaaattagctgggagtggtggcaggtgcctgtaatcccagcttcttgggaggctaatgtaggagaatcgcttgaacccaggaggtggaggctgcagtgagctgagatcatgccactgtactccagcctggtaacacagcaatattctgtctcaaaaaaaaaaaaaaaaaaaaaaaaaaaaataaataaataaataaaagaacagaacaatagctttgtaaagcatagatcctggaaacataataaacagaaacaataggacattaaaaatgtctataaatatgtgaaacatttatatttatatccatatttatatgaaacatatttattgtttaagccaactgcagattctgatatttgtagcttaaagtttcaaaggaaactaaaaatgttactttaaagggttaatctttatagctgtcttcccccattgaatattcaggctccagtttaagtttcttttttttttgagacggagtctcgctctgttgcccaggctggagtgcagtggcgcaatctcggttcactgcaagctccacctcccgggttcatgccattctcctgcctcagcctcctgagtagctgggactacaggcgcccaccaccacgcctggctaatttttgtatttttagtagagaaggggtttcaccttgttagccaggatggtctcgatctcctgaccttgtgatccacccacctcggcctcccaaagtgctgggattacaggtgtgagccaccgcgcccagctcaggctccagtataaggaaggatgaatcagtttaagaagcttggagagagctgttcttggtgaaggtcccagatgaaatggcatcccttttggaccactctctaactataccacgatctagggacatggcagggtggaggaaatatgcaagggaagcccccagaatgatcagaacctgtcgcagttagtgaaaaactgtgccaccttccctctagggaacaaaggaacaaaccatctcaacatatggcgccagcatccttctctggggagttcctagtgttgatgaagagcagattgctgaaaggccatttatgcacctggatccatctgttcctgaaggcaaaatttttcctagggttcctagtgttgatgaaggtgggatggaacctaacagcaggacagccagctcatcacacactcaggttgtctaatcagcatgggttctctgatgatcagcaagctgtgtgccccaagcaaaggctttctcaaaatcatcacagatgtaggcattctggccagtatgaagcctctggtgttcagtcaggtgtgaactccagctgaaaccctctccacactcctcacatgtgtagcgtttgctgccagtgtggaccttctgatgttggagaaggtgtgagatctgggtataggttctcccacagtcactacacttgtaaggcttctctccagtgtgaatcctttggtgttggattaagtggatgctctggttgaaggccttcccacattccttgcaggcgtagggcttctcgccggtgtgaatcttctgatgttgagtgagggatgagttgtgactgaaggttttcccacattccttacacttatagggcttctcgccagtgtggatcttctggtgctcaatgaggtgcgtgctctggctgaaggctttcccacactctctgccctcgtagggcctctctccagtgtgaatcctctggtgttgaatgaggtgggagatctgggtataggctttcccacacactttacattcatagggtttctcccctgtgtgaatcctctggtggtgtgtgagggaggagttctggctgaaggttttcccacactctgtacatttgtagggcttctcaccggtgtggatggtctggtgctgagtaaaggatgaggtgtggctgaaagccttcccacattcgttgcatacatagggcttttcccccacgtgagtgctctggtgcctcatgaggtgggaaatctgcgtgtaagccttcccgcactcgtgacacgcgtagggcttctcgccagtgtgaattcgctgatgctgggtcagggacgagctgtggctgaaggctttgccacaatcagtgcactcatagggtttttctccagtgtggactcgctggtgctcagtcagggatgagctgtggctgaacgttttcccacacttgttacatttgtagggtttctcccccgtgtgggtggtctggtgttgggtcagggaggaggtgtgacagaaggccttgccgcactctccacattggtagggcttctcccccgtgtggattttctggtggcgggtgaggtgggagacctgcgagtagaacttcccacactggccgcatttatagggcttctccccggtgtggcaccgctggtgtttgatgagggatgagctctgtgtgaaggccttcccgcagtccttgcctttgtagggcttctctccagtgtgaatcctctgatgctaggtaagcgaagagctctgagtgaaggtcttgccacatgcatggcaggcatagggcttctcgcctgtttggatgatgtggtgctgaatgaaatatgagctgttgctgaacgccttcccgcagtcacagcacctgtggggcttctccctggtgtgaattcgctgatggagaatatagtccgaatggtaaatgaaggctttcccacattccgtgcagttaaatggtttcttctccacgaacgtcctttggcgtttcaagctcttccagggcctgccccacttccggggcctgtctccaaagggcactcgttgcttcctgatgagggcagaggcctgccggaggcttctcccaagctcgttacacccaaggcctctctcccccgaggtgtctcccttgggagtagcaaataaacacctcaaatgcctctcctgctttcttgcatcctccgaccgatagtgacatgccaagggtttccccacctgggcatctccaagcatggcccttaaaggtccctctactggggaagctgaatcttcagaaatgctcttttttcgaggtgtctctcgaatagtcacagagcttgtctccgagtctgaaagaaatggaaaataccaataccacctgtcccaggacaaagcaagctgattacttggaagtggcagtgtaaacctaaaaaaaaaaaaaaaatttcaaactcgatgttgctactttgtttgtttctttcttcttttttctttttttttgagacaaagtcttgttctgttgcctaggctggagtgcagtggcaccatctccacctcccggattcaagcaattctcctgcctcagccccctgagttgctgggaccacaggcgcccaccaccacacctggctaatttttttgtatttttagaagagatggggtttcaccatattggtcaagctggtctcaaactcctgacctcgtgatccacccacctcggcctcccaaagtgctgggattacaggcatgagccaccgtgcttggccgatgttgctattttgaaaggcatggtgtacgtagatagattcatgttctgacatggaaggatagtctcaatacactctaaaaatgaagacaaccaagttctaaacagtttatgtacacagagttgagtagctatgctatagagtacattttttttacaaatcaataagaaaaatgatagaaaaaaatctaagaaaatagagaggcgagaatatgagtagacaattcacggaagaaaaataagaggctgataaatacatgtatagatgctgaacatcagcaatagttaaaaaaatcaaatcattaggatgctattttacccattttagattggaaaatattaaagatatccagtgttgccaagggagcatggcacagaccttctcacactatgtttgtgggaatgtgcaaggaaagagtgaacagaaggtccatctcagttttttttgtttgtttgttttttgtttttgagatagagtctcgctgtgttgcccaggctggagtgcaatggcacgatctcagctcactgcaacctccatctcctgggttcaagccattctcctgcctcagcctcccaggtagctgggagtacaggcatgcgccaccacacctggctaatttttttttttttttgtatttttagtagagctggggtttcaccatgctggccaggctggtctcgaactcctgacctcaagtcatccgcctgccttggcctcccaaagtgctgggattatagacttgagccactgcgcccagcccatctcactcagtctttgtttatctctgcagatatggcaatgacccttggccagtctctgggaactaaactcctgggatgtttacacaggtgctgggtaagatgttcttccatatgctcaagaccacgggtcaagatgtactaggctgtcagcattgttgactgtaaatatgaagatgcatgatgggcacctggtacctggattggagttctcactctgttcatgtagcaggtatgtgcatacgtgaccagctctcttcaagaactctggactataagactccaagtgggcttcctggggtggagacacctcatacatgtgtctgtggttttgcattagtggaaaaatgcacgtccatgtgacccacacagggaaagggagggctggaaacctgtgtatgacctctcttgcctttgttagttcctactgttcctgagttacaaactttgctgtaaaccgtcaatacaactcgccaagtcatgtgactccttccggaaaatcgccaaaccagtgggtggttgtgggacccccaaaacagagacatgacaactaaatgctatgtgagattcctgaaattatccttttgtcattggattaggcaatggtatcttagacatgatgtcaaaaatcacaaagcaacacaagcaaaatagatacattggacactgtcaaaattaaaacctaggccaggcacattggctcacacctgtaatcccagcactttgggaggccaaggtgggtggatcacttgagctcaggagttcatgaacagcctgggtaacatggctgaaccctgtctctaccaaacatacaagaattaggtagcgatggtacacgcctgtggtcccagctacttggaaggctgaggtgggaggatcaacaaagccccggaagttgaggctgcagtgagccatgattgcgccactgcactccagcctgggtgagaccctgtctcaaaaataataataattaaaaatttaaacctttgtgcttcaaagacactagtaagaagcaaaaagacaactaatagaatgggagaaaattttttccaatcatatgtctgataaagaacttgtttctagaatacataaagcatacttacaactcagtattttggtttttgagacggagtctcgctctgtcacccaggctggagtgcagtggcacgatcccgggtcactgcaacctccgcctcccaggttcaagtgattctcctgcctcaacctcccaagtagctgggactgcaggcacgcaccaccaggcccagctaatttttctatatttagtagagacagggtttcaccgtgttggccaggatggtctcgatctcttgacctcatgatccacccacctcagtctcccaaagtgctgggattacaggtgtgagctaccacacctggccacaactcaatatttttaaaaactcaattaaaaaagggcaaagttctcaatagtcatttctttaaagatatacaaatggccaataagtacatgaaaagatactcaacatcattagacatcaaggaaaatgaaatgaaaatcatgagattccacttcacactcactagttatataataaaaaagacagatagtaacaagcgttggtgaggatgcggagaaatcagagccctcacacactgctggtgggaatgtaacatggtacagccactttggaaaatagtctggcagtttctcaaaaggttaaacatagaattaccctatgattcaacaattccattcctaggtatctacccgaaataaatgaaaacatacattcacacaaaaacttgtgcatgaatgttcatagcagtatgattcataatagccaaaaagaagacataactcaatgttcaccaactgatgaataaaccaactgtggtacattcatacaacaaaatagtattcagccataaacaggaatgaagctctcatacatactgcaatgtgaatgactcttaaaaatattatgctaggctgggcgtggtggctcacgcctgtaatcccagcactttgggaggctgggcgggggtgggggggtggatcacgaggtctggagttcgagaccagcctggccaccatggtgaaattctgcctctactaaaaatacaaaaattagccaggtgtggtggcaggtgcccatacccagctacttgggaggctgaggcaggagaatcacttgaacccgagaggcggagcctgcagtgagccaagatcgtgccactgcactccagcttgggtgacagagcgagactccgtctcaaaaaataaataaaaaaataaaaaataaataaaaataaatgaataaaaagaaatgatgagcagaaagcaaaaccatctggaatttgtggagggaatggatttttttttggagctagtgggtttgttcatggaatgtccattaattacatatgtgccaaccacggtgctgtgagtaggtgaccttttgctaaacaagatatctggttcttgtcctcagagaggggggagaggcaggcttatattcagacattttggacatatcctacttatctctttagcatccctgtctttgaacaaccactgctccccttttcctatagtcttggtggggctgtcacatatctccccaacccccacctcagcaatgggcatcagacttccgactggccaatcataataccccgttcctcgggccataataattggttcatcatccaaagggacccagtcagagtcttccccgagatgagtatatggggttattaggcagaatataagtttgagactgtgggtagccacgttgattgctacttggaaaggtctgtagacaaaacgaagctagaaacagacagaatcaacacatgtggaaagcgaaggagggggaaggtgggggttgtggggagagagagagagagagagaacaagtaagccctgacaataccatttaaggccttagattcatgtatgccgaaagtcttgcactgcaatacttcctagttatatgggtcaaaaaaaatctaatttttcttaagctattttgattctttacatgtgggagtcctgatatatcagataataacaattattattattgcaatagagaacattcattaaatgctgactacctgccagatactgttctgagcttgttccgtgtattaagtaatttcatcatccaaacatttcattgaggtgggtactattattctccctatttaataggtaaggacggccgggcgcagtggctcacgcctgtaatcccagcactttgggaggctggggcgggtggatcatgaggtcaggagttcgagaccagcctggccaacatgatgaaaccctgtctctactaaaaatacaaaaaattagccaggcacggtggggggcacctataatcccagctactctggaggctgagacaggagaatcacttgaactcgagaggcggaggttgcagtgagtccaggttcaccactgtactctagcctgggcgacagagcaagactccatctcaaaaaaaaaaaaaaggtaaggaaatggaggcaccaatagattaagtcacttgcccacaatcacgcagtgggagaaaggggatttgaactcagagtctacactcttaagtacaacatgcacaagtgcagtaatagcaccttgagctaggagctgtgaaaacgctgagaagcggtggcctagttatcacggaaggccacttggaggaggtgacctgtaagcttcatcgtgaaacacatgaaggtgcttgccaggcagaaaaagcagggaagggtattccagacagagggaacagcatgtgtgaaggcccaaaggtggcaacacacattcaggttgaggtacggacaggtgcttcagtgaggtcagggcatggtgtacaatcaggggtggatggtgaagatgaggccagagaaagcacaggctgagtgacacagggcaccgagtgccaggctgaggggctgggacttcatcttgggggtactggggaagcaggggagggtgtgagcaggggagggagggggttagctctcagtatggaaggatcccctggggcggtgtcaactggaggggtaagtctgggggccaggaggctggggtgagggtccaggggagagaagctgaggcctggccaggggcaggagggacaaggctggggactgatgggctgtgacgggacaaggggagggtcgggtgagaattataacgatgacagccattgaagccactaccgactctgtgccaagctctgggctctgctctgtatctgttaattcatttattcctcccaatcctagacactcatgtcacctccttttcacagatgaaaaaaatcaaagcacagagaggctaagtgacttgcccaaggccacacagccaggaagcaatcagctgggatttgaacccacacaacccgactcccgagcccacgatgatcacccgtgtgttccactgcctcacccctgagtgaacctcactgaccatgagagatggggtaggaagagggctcacacctgctggatatcctcacccacctgggcaggtaactcgccgggcctctctctcctgcctcagctcttcccctcgatccacacgggagatcacgtcggatttggacccaggcagccctgcccctggggaaagatacaagagttggctgtgggtgccagaatcacagggaggtctacagggaaggtgcacgcactgagcgcctaatgattggacgtacaaatggccaacgccaagacttatttgttgtgtgcttagcacactgcagagaggctgagccaacttatttgttgagtgcttaggacactgcagagaggctgagctctgacaaagctgtttaaggctccgcgtctgtgctgttcgagttaactgcactgtgacagtataagaaacatcgtcttctgtgtttcgaagacttactaaagaaaaaaacagtaaaatctctcaatcatttgttaattgattattatttcagtgtgtcaagatgataagattttagatagcttgaggtgaataaaatgtattattaaaattaatttcatttgtttcttcttattttttttaacgtgaccgccaaaaaatgtaaaattacctaagtgggttgcatcttatttctgatggacaactctgtttagattcattgatgtccaaagcttccatctcaagacttctaaatacataagttaaaacattcactttttttttttgagacaggttcttgctctgttgcccaggccgaagtgcagtggcacaatcatggctcactgcagcctcgacctcctgggctcaagtgatcctcccacctcagcctcctgaatagctgggactacaggcatgcaccaccatacctggctaattttcaaattttttatagagatggggtctcactatgttgcccaggctgatctcaaattcctgggcttaagtgatccacccaccctgaacatttccttttttcttttttagatggagtttcactcttgttgcccaggctggagtgcaatggtgtggtctcggctcactgcaacctccgtctcctgggttgaagcaattctcctgcctcagcctcccaagtagctgggattacaggtgcctgccaccatgcttggctaattttttgtatttttagtagaaacgggtttcaccatgttggccaggctggtctcgaactcctgacctcaggtgatctgcccgccttggcctcccaaagtgctgggattgcaggcatgagccactgcacccagtccagacattttcgttttgatgaaactgtcttgaatcactgtagacaaacataccatccctgattaaaacatgaagtaattacaatagttagggtgatactaaaaagtgaatgtctattaagcgcagattacatgccaggcatgtttctaagctggttaaatgtagtacctcattttcacccttcaggcaggaaaccgaggcacagtctagtgttgtgtgagcaggaatggaagaaacacgcaacactgcaggaagtcacagagggtgcagaaatcaaaggaaacttcctggaggaggtgagccaagaggtgactagactaggggtgaggaggagatgaattttggttcaacaaacatgcctggccaggcacggtggctcatgcctgtaatcccagcactttaggaggccaaggcgggtggatcacgaggccaggagttcaagaccagcctggccaaaatggtgaaaccctgtctctactaaaaatacaaaaattacccgggcgtggtggtgggcacctgtaatcccagctactcaggaagctgaggcagagaattgcttgaacctgggaggtggaggttgcaatgagccgagatcgcgccactgcactctggcctgggtgacagagcaagactctgtctaaaaaacaaacaaacaaacaaacaaacaaaaaaacatgcccaaaggcctcccggtctccctgtgccactccctggcactgctggagatacagaaatgatctggacactcccctgtgcttgagggcgtctcaggctgaagggggaggcagacctggacacagttacaatccagggtgactccgggactcctttcctacaaggatcctgtcctccctctgtcttaggtgcccaggcctatggtcacagccttcatctctgataatgacacaaatctccacatcttggtgtcagacaccccctcccacctcccagcctcccggggactttctccactatactttatcttattattttaattttattttttgagacaggatcttgctctgttgcccaggctggagtgaagttgcacaatcacaacccactgcagacttgatctccctgggctcaagccatcttcccacctcagcctcccgagtggctgggactacaggtgcatgccaccacatcccgctaatttttacgttttttgtagagacaaggtcttgctatgttgcccaggctggtctcgaactcctgacctcaagcaatcctcccacctcagcctccccatgtgctgggattacaggcatgaaccaccgtgcctgacctttctccagttcttgactccagctatccttccatggacaaggagggtgccctagagcctggcttggtggctgggtgaaccatgaggtctgcctctaactgccacagtcaggggacagaggagcagggacccaggacagctaatcttctgatactgcagccccctcaccatgtattgcctcccatgatttcaccttccactctccagcctggcatttaccacccatccctgtaaccactcccctgcctgcacccctacctgccctgtccctcttggcctgcactgagctcaccaggtaacagccctgctgtggttagagccaaacagcctctgacctgggtgctggtgcccaagaaggcattgccactaaggtcttttttttttttttttttggagacagtctctctctgttcccatgctggagtgcagtggcacgatctcagctcactgcaacctccgcctccctagacaagatcgtgccactgcactccagcctgggcaacagagcaagactctatctccaaaaaaaaaaagaagaagaagaagaggatacacagacacggagggaagaggccacatggcacagacgcagagaaagaagggaggcgggtaccagccaagaaatgccaggaggcaccaggtgttggaagaggtgaggaaggaccctcccctggagcctttggaggcagcgtggccgagctgtcaccttggttttagactctggtccagaatcatgagagaactgatggctgttgtcataagccaccacgtttgtggttgtgcattgtggcagcagcaggatacactcccccatgcccctactgctcgtgcccgtgagcagacgcatgtgctgtcacagatgccatcttaaagacaaccttctggccaggtgccgtggctcacacctgtaagcccagcgcttttcaaggccgaagccagcggatcacttgagatcaggagttcgagaccagcctgaccaacacggtgaaaccctgtctctactaaaaattacaaaaattacccaggcgtggtggcatgcgcctgtaatcccagctactcgggaggctgaggcaggagagtcacttgaacccgggaagtggaggctgcagtgagctgagatcgcaccactgcactccagcctgggcaacagtgagactgtctcaaaaaaaaaaaaaaaaaaaaaaaggaaaaaaagacaaggccaggcgcagtggctcatgcctgtaatcccagcactttgggaggccaaggtgggcagatctctgagattaggagttcgagaccagcctgaccaacatggagaaaccctgtctctactaaaaatacaaaattagtcggatgtggtggtgcatgcctgtaatcccagctactcgggaggctgaggcaggagaatcgcttgaacccaggaggcggaggttgtggtgagccgagatcgcgccattgcattccagcctgggcaacaagagcaaaacttcatctcaaaaaaaaaaaaaaaaaaaaaagacaaccttcctgtgatcaccacagagtgaggcagtgggggaacagaaagtggtgacactggggagagtgtcagggccaggacacatacgggtatgaaagagatggtaaagacagtgccctgggctgggtgtggtggctcatacctggaatgccagcactttgggaggctgaggtgggcagatcacttgaggtcaggagttcgagacctgcctggccaacatggtgaaaccccatctctactaaaaatacaaaaattagctgggtgtggtggtgcatgcctgtaatcccagctactcagaaggctgaggcaggagaatcgcttgaacctgggaggcggaggttgcagtgagcagagctcgtgctactatactccagcctgggagacagagcgagactccgtctcaaaaacaaaaaaacaaaaaaagtcagtgccctggactggcctggcctggtctctgggtgggcaggggtctgtctctgagatgggagacctgaaggaggaatgagtttgggggtgacatgacccgctcaggggagacagggagtgtggggtcctgagccttccccatggtggtattgtggaggccacaagctatacaaggttgaaactcatgggacacattgaagggacaccattgtggatgtgtggaaaagggtgaacacagccggcctgagatgctccctttggaaagtcctgatggccaggtagaccctaggctgaggtccagcaacctggactttaggagggttcccagaatttcctaactgatgtggggctcactagagcctcagttgcttgtggttttaattttaattttaattttttttagagataggggtctcactatgttgcccaggctggactcgtaatcctgggctcaagtgatcctcctctcttggcctccgaaagtgctgggattacaggcgtgagccactgtgcccagccctaaactgtttgtgcaaacaccatggtttatgctgaacacctgcttttttcccaggagtctaaaatttgggtacattttagtagagggggctgtgtgagcaacccccaggaaaaaccctgagcacagccgggcacgatggctcacgcttgtaatcccagctcgtagggagacagaggctggaggatagcttgagcccaggagttcaagacttgcctgggcaatatagagagatcctgttaaaaaaaaaaaatgctgagccctgagtctctggtgagcttctctggtgataacatttcccatgtgttgtcacctcttgctgctgggagaattaaaccatcctatgtggctccactgggagaaggttctggaagcttggcctggtttctcctggatggcgccccgggtgcccttcccctttgccagctgtgctgtctcctttctctgtaataaaccatcactgagcgtttaactaagggctgagtccctggcacccgctaacaaatcagtcacctgtggtggtcttggggaccgaccctgatggagaagtttgggccacgtttttaatgagaccacatttttttttttttgagacagagtcactctgttgcccaggctggagtgcaatggcgagatctcagctcactgcaacctccgcctcccaagttcaagtgattctcccacctcagcctcctgagtagctgggattacaggtgcccaccaccatgcccagctaatgtttgtatttttagtagagatggggtttcactgtgttgtccaggctagtctcaaactcctgacctcaaatgatctggccgcctcggcctctcaaagtgctgggattacagatgtgagctactgcgtccagcctaagccacatttttgatgagtttgtccagagaaagtgcgtgagtgaggagggctgaggatggagacgtcacatcaccacagctacttacaggggaacataaagacggagaacgacaggtccaggaaggtgggaagtgaaaccagcaagggggctgtgctgaggtgcaggggcaagacgaggcctgggcagggctggggccgtggggatggtaaggagggtgtaggagggcagggctgtggcctgaggggtcctgtggacaaggggaagtaggggatgttgtgagcagaattgctggcatccccctaaaatgcataagttgaaacctagtccccaggtgatggtgttaggagctgaggccttttggaagcgattaggtcatgggggtagagctctcgtggcaggggttagtgcccttacaaaagacaccccagagagctctcttgctcctccactctgtaaggctatagagagcagcctctgtcggccggatgtggtggctcatgcccgtaaatcccagccctttgggaggccaaagtgggtggatcactgaggtcaggagttcaagaccagcctggccaacatggtgaaaccccctctctactaaaaataccaaaaaaattagctgggtgtggtggcgggcaccagtaatcccagctatttggggaggctgaggcaggagaatcacttgaacccgggaggtggaagttgcagtgagccaagattgcgccactgcactccagcctgggtgacagagtaagactctgactcaattaaaaaaaagaaagaaaaaaaaaaagagagaaggcgccgtctatgaaccaggaagcgccctcaccagacaccaagtctgctgtcgccttcatcttcgacttcccagcctccaaaactctgacataaatttctttctttctttctttcttttttttttttgaaacggagtctcactctgtcacccaggctggagtgcagtggcgcgatctcggctcactgcaagctccgcctcccgggttcacaccattcttctgcctcagctcccgagtagctgggactacaggcacccaccacaatgcccggctaattttttttatttttagtagagatggggtttcaccgtgttagccaggatggtctcgatctcctgacctcgtgatctgcccgccttggcctcccaaagtgctgggattacaggcatgagccaccgtgcccggccaactctgacatacatttctgctgttagaagctacccagtttacagcattttgttagagcagctcaaactaagcaagtcagggccgaggatggtgcccgggggtctggtctggagacctggggggatgtggggccaaccagaggtggggacctggaggaagagaagcaggacggtgggtgaactgagctcggcgtggggtggatgtgaggggtgggaggtggggagggctatgcctggaggcaggaaggtgggcaagtgcaggatctcggagacacactaggggacagcgtttatatgctctggggagaagatgccgaggtcagattgggacctgttgattgggaacatgtccgggaggcgcttggagcctgagattctggactgggcgttccagtgtggagcctgaagtccggggacagggaggtcaccatgtgtggaagggaaagcgttagaagaagctggatgaccaggcacggtggctgacgcctataatcccagcactttgggagtccaaggtgggcacatcacctgaggtcaggagttccagaccagcctggccaacacagtgaacccgtctctactaaaaatacaaaaattagccagcatggtggtgtgtgcctgtaattccagcaactcgggaggctgagacagaggaattgcttgaacccaggaggtggagattgcagtcagctgagatcacgccactgccctccagcctggtgacagagtgagactccatctcaaaaaaaaaaaaaaaaaaaaaaaaagaagaagaagaagaagctggggacacaggctgaagagtttgcgggactcacattttacaggacaggccaagggacttgggccctcctggctgctgggactccaggcagaaagagaggaagggagaggcccccagaaagagaggaagggagaggccaggcgtgagggaccagtgagaggagcacagaggcccccagatggcaggggatggacatgaatgagaagagggtgccaggaggcatcagagagagggctgggggcatcagagagggtgccgggggcatcaggcctcccccgggggagggcagagggaggggcctcacccagggagagaaggttccagtagttctccagcatcacgtctccagcaaactttcaccacatcaccagatttagtctggccctgctgtgggcttttttccagtgatcatgagggacccaacagctgggcacagaactcagatttgagattggaaaagacggggactctactaaggtggataggatggaggctactccctcctcctgtcattcactcatttatccattcattaattcatcccaccaaccttcccaggagtttctggtgagccactgcccatgttgggcaacgctggcggcacagagtctaggccgagtcctgacactgcccatgaatttcagcccctcatgctccctgtggccccagaagatccttctacacccagagcttcccctccccttccttgctcacagccctcccgtggctccccagtggccccaggacagagtctcagcccctctgataccatgcaggacttgccccactcatccctacagcctcatctctcctcgcatttgcagagactcctcttttttgtgcctccatttccccatctgtagaatggaattgtaataccatctgtccgtcacttcagggccaagtgagaaagcgcatcctaaataatgaaacaggattgacgtcttctcctgttgatgattagcatctgtttcaactctctgtctctcactcccgaaccttctgcactttctcctttaggaaaagactgtgaccagcttcacaaaaggcagcaaaggactatcagagaaagagaactccgagtgaggggtaagcagcctggccacagggaaggggctgggggtggagatgcctgcatctgagggaggaggggctgggggcctggactcctgggtctgagggaggaggggctgggcctgggactcctgggtctctgggtggtgatggagctacaggaggtcgtggtgcagttctctgccattgctgacccctcctttcctgctccatcgtgcaggtctggcctaggcccgggatcggaccaggctccctcaggaccccatcctttcctgcccggaccgtgaattcatctccttgaagccataacgtccgagctgctggtgcggggcagccctggccctaggcttcctacccctggaagcgagaggatgagaggaggccggcccagctccttctttcagggtggggggcattcagcctccactgtgtctgtcttttcttccctggggctccccctcgaggcgaggggccatgcatgtctgggggacccctgccccccaaaaccctctgtctgtctctgtctctttgctgtttgtccaagactcagtgtcccgacccttgttctcgccgtgaatgtcaatgggccaatcctctctgtcctttcagacacacacacacctgtgtccaccccttctgttcgccacaccctgcgtctggccggtccccccactgctgctgctatcaacgccagaataaacacactccgtgggtctcactccaactgggcctcctgtcctctctgagactgggaaaccggattggaacatgctggctctgcaagcagacaaatttgtgtttctttcaatgactgggcaacttaatgatctctctgagcctcagtttataaaaatggtgttagtcaggatcattgtgagtacagaacacaaaattcaacccaaagccataaacagaattgaaagacctctgtccatggaaagcctatgaacacattgaacacagagggacttcaggcatggttagatccagctgttcaagggactctcacttctgctttcctctttttttttttttttaatggagtttcactcttgttgcccaggctggagtgcagtggtgtgatctcagctcactgcaacctcccggtttcaagcgattctcctgcctcagcctcctgagtagctgggattacagccgctcgccaccacacctggctaactttttgtattagtagagacggggtttcaccatgttggcaggctggtctcgagctcctgacctcctgtgatctgcccgccttggcctcccaaagcgctgggtttacaggcatgagccaccgcgcctagctattggcttctctctcaggtaggtgtttgcagtggcaatgagatggtcacttggagctccaggtgtataatgctgtatctgttatgataccttcggctgaaaaaaaaaaaaaaccttcccaactgaaagagaaagatttttttgcatgtttgcatatcaaatttttcaaagacagtcccagggttggttcagctgctcaacaacattaggctctggttggcatctctgagactggtgttcgttcccctcctgagtacaaactgtctatagcagcatcatgttctcacacactggcatctaaatcaggcagtgtagaccggggcctccccttctgtgttccccttttttcctcctcagaataattctccttatttctctcttgccagaacccggctgtgtggctaccccgagttgcaaagcggtctgggtagtgaacatctgtcatttccagttcccatggtggggtgcagctttgcctagaggaagcacggggaggggaactattgttgggtaggaaattaacaggatctgctgccattgcaagaaattaacaggacttgtaattgccttcagagcagataacttcagaggaaacaatgtgagaatcagctggctcccagctgctgcgtcattcaggaacaggattctgattggtccagcgcagaccttggagacaccccgggccaatcattgggtccagtttggagcctactcttgggcccgcctcctgcctttgctgactcctcctcctcctcccctgcccatcttgcccaggattggtccaaagcccctctggacctcatccctttttgctggaaggatgaattcatctcctggaagccatatatgtaggggtcccttgactgacagttccaaatgaatcacacggcaatgggcaagggacagtccctcaaagcagtaggtgtccactacattctaccctcagctacttcacactaattcacatctacattccgggacacaacatttcaaaaactcccactgcaaaaattggtccaatcactgtgtcagtttgctaggactgatgtaacaggttacaataacctagctgaaaacaacagaaatttattctctcacagctctggaggccagaagtctgaagtcaatgtggtagtaaccaccaggcacagtggctcatgcctgtaaatcccagcactttgggaggctgaggcaggaggattgctcaagcccaggagtttgagaccaggtaatatggtgagattctcttaaaaaaaaaaaaaaaaaattggccgggcatggtgatgttcacttgtagttccagctactttggaggtcgaggtgggagtattgctcgagctcaggagttcgagaccagcctgggcagcatagcaagaccctgtctctacaactaatagtagtaataataataatagtaaaattatccaggcatgatggtgctcacctgtagtcccagctactctggtggctgaggcaggaggatcacttgagcccaggagtttgaggctgcagtgagctgtgatggcactgctgccctgcatctcaaaaacatgatgccgtgtgatacagccagatacaagggtatatgctgtaggattccacttttgtgaaattgtagaaagaaaacactaatatgggcggggcatggtggctcacgcctgtaatcctagcactttgggaggctgaggcaggcggattacttgagatcaggagttcaaaagcagcctggcacctgtaatcccagctacctgggaggctgagtaggagaatcgggaggcggaggttgcagtgggccgatcatgccactgcactccagcctgggcaacagagtgagactccaactcaaaaaagaaagagagaaagaaagaaagagagagagagagagagaaggaaggaaggagagagagacacaaagaaagaaagaaagaaagaaagaaagaaagaaagaaagaaagaaagaaagaaagaaagaaaggggccagaggccaggcacggtggctcaccctgtaatcccagcactttgggaggccgaggcaggtggatcacgaggtcaggagttcaagaccagcctggccaacatggtaaaaccccatctctactaaaaatacaaaaattaaccgggtgtggtagcgagtgcctgtaatcccagctacttggaaggctgaggcaggagaatggcttgaacctgggaggcggaggttgtagtgagctgagatcacaccactgaactccagcctgggtgacagagtaaaagaaaagaaaagaagagaagagaagaaaagagaaaagaaaaggctaatacgcaggggcagaaaatggattagtggttgactgggggcagtggcagtggttatggagagactgattactagtggacacaggaaaactttccggatgatggaagtgatcacacaaccgaatacatttgtcaaaattcattgcgtttaaaattggttcatttaaattcttgtacattgttgcaaaatacacataacacaaactttaccatcttagccaattttttttttttttgagacggagtctcgctgcaatgcccaggctggagtgcaatggcatggtcttggctcactgcaacctctgcttccccggttcaagcgattctcctgcctcagcttccagagtagctgagattacaggcatgagccactttcccaggacttagccaattttaagtgtacagttgcattgttgtgcaatcatcacccctactcatctccactctttcctcttgtagaattgaaactgttcccatcaagcaactcccactgccttcccttcccagcccctgggaagcacgttctactctctgggaaattccctatgaatttgactactctaggtacctcatgtaagtggaatcatacagcatctgtctttttgtgatgggattgtttcacttagcatgaatgtcctcaggcttcacccatgttgtagcatgtgttagcatttccttcctttttaaggttaaataattttccattatgggcctggtgcagtggctcacacctgtaatcccagcactttgggaggaagaggcaggcggatcacgaggtcaggaaatcgagaccatcctggtcaacatggtgaaaccccatctctactaaactacaaaaaattagccgggcgtggtggcaggcgcctgtagtcccagctacttgggaggctgaggcaggggaatcacttaaacctgggaggcggaggttgcagtgagccaagatcgcaccactgcactctagcctgggcgacagagcgagactccatctcaaaaaaaaaatccattatgtgtatataccacattttgtcgaaccatttatttgttgatgaacagctgggttgcctcctttaccttttgggtattgtaaataatgctgctatgaaagtgggttgcaaatatctttttgaaatattgatccattttcttgtacacaaattatattttgataaagttggctaaaactaatactcccacctaacataactatctctagtgcaactgcagaagctttcaccccttctgcaaagggagggatcccaaagccacatccaatcctcagaccaagatttctggatattggctattcctttcatcaagggcacatggagtctctcttgatcctgaaaattaatgttaaggctgggcacggtagctcacacctgtaatcccagcactttgggaggccaaggcaagtggatcacctgaggtcaggagttcaagaccagcctggccagcatggtgaaaccctgtctctactaaaagtacaaaaattagcccggcatggtggcacacacctataatcccagctactcgggaggccgaggcagaagaatcacttgaacctgggaggcggaggttgcagtcagtggagattgtgccactgcactccagcctggtgacagagcaagactccatctaaaaaaaaaattaatgttaaatgaaattgtagccccctcagcaacccacccctgtgtataacagtggaggaaaaacaagaaaacaatcacaattctcacttgaaaggggagggaagagaaacaaaatagtatatgccatttgctagacttgccaagactcctgcactttcaagagacaaaaaaccggccttttaaaaaattattgccaagctcggtggctcatgcctgtaattccagcactttgagaggctaagattggaggatcactagagcccaggagttcgagacccagccttggcaacatagcaagactccatctctttaaaaaaaaaaaaaaaaaaatatatatatatatatatatatatatagccaagtgccatggtgtgcacctgtagtcccagctactcaagaggctaaggtgggaggatcgcttgagcccaggaggtcaaggctgcagtgagccatggttgagccactgcagtccagtctggacgacagagacccagtttcaaaaaaaaaattattgaagtacaacatactcacaaagaaactcacaaatacccagtaagtatggatcagatgacagactgagcacaccatgtaaccatgggtaaccagccctgggtcaggaactagaacattaccagctctccaaacccctcatgctccttgtcagtcacttttttgtgttttttttttttttttgagacagagtctcgcctggagtgcagtggcgctatctcggctcactgcaagctccgcctcctgggttcacgccattctcctgcctcggcctcccgagtagccgggactacaggcgcctgccactatgcctggctaatttttttgtatttttagtagagacggggtttcaccgtgttagccaggatggtctcgatctcctgacctcatgatctgcccacctcggcctcccaaagtgctgggattacaggcgtgagccaccgcgcccggccccttgtcagtcacttcttcacctcaaaggtaactactaccctgatttctgacaccataagtcagtttgccttgtttttgatcttaatctgcttggaatcctacaagcatagagacttgtgtgttggaattcttttttttttttttttttttttttgagacggagagtcgctctgtcaccaggctggagtgcagtggcatgatctcagctcactgcaaccttcgcctcccaggttcaaacgattctcctgcctcagcctcctgagtagctgggattacaggtgcgcactaccacacccagctaattttttgtatttttagtagagacagggtttcaccatgttggccaggatggtttctatttcttgacctcgtgatctgcccatctcggcctcccaaagtgttggaattacaggcgtgagccattgcacctggcctgaattgttttattcatcatacgtctatgagatttgtccatgtagttgctgattgttggaggttgttcattatcattgctgtataagagtgtgttatgagccaggcacggtggctcatgcctataatcctagcactttaggagggtgaggcaagcagatatcttgagcacaggagttcaagaccagcctgagcaacatagcaagaccccgtctctacaaaaaaaatacaaaaattagtggggtgtggtggtgcgtgcctatcatctcagctacttgggaagctgaggtgggaggatggcttgagcttgggaggcagaaattgcagtgagctgagatcacaccactgcactacagcctgggtgacagaggacaatcttgtctcaaaaaaaaaagtgtgttatgggaatacataataatctatgtatccattctactgttgattgacatttaggtgccttctgatttggcatgatcacttacagtactgctatatacattgaattttggtgaacatatgtaggcatttctgtatttctgttgggtatatacctagaagtgtaattgctgggtcccagggtgtatgcatggtgtgggcatgttcctctttttttttttttttttgagatgggagtggccaggctggtcgtgacctcaagtgatccgccgcctcccaaagtgttggaattacaggcatgagtcaccattcccagcttcatgttcatccttaatagacactgccaaccaggttttcaaactaattttctccatttatacacccgccagcagtctctgagaatttcagctgctcgccaacatttggtattgttagtcctttcaattttagcaattctggtggggctgtagccgtgttttattatggttttaatttacctttagcccaatgcctaaagaaatttaacaccgttttgggccaggcgcagtggctcatgcctataatcccagcactttgggaggccgaggcgggtggatcacgaggtcaggagatcgagaccacggtgaaaccccgtctctactaaaaatacaaaaaattagctgggcgcagtggcgggtgcctgtagtcccagctactcaggaggctgaggcaggagaatggcgtgaacccagaaggcggagcttgcagtgagccaagatcacgccactgcactccagcctgggagacagagcgagactccgtctcaaaaaaaaaataagaaagaaatttaacactgtttcaaatatttattgggcatatgaacatgctactttgtgaaatgtcaattcacgccattcgtccatttttcgactggtttttctgccttttttaaaaaacaggttagtaggagttatttctttatttttcttatgagtcttttgttagaatacatattcttctcccactctctggcttgtcttttcattctcttaatggtattttttgatgaggatcagtttctattttaatatagtccaatttatcaacattttcctttatagttaaggctcctttgtttctggtttaagaaatattttctggccaggcacactggctcatgcctgtaatctcagcactttgggaggctgaggagggaggatcatatgagcctaggagttcgagaccagcctgggcaacatagcgagaccctatctctattaacacaaacaagtaaataaaagaaatattttcttaccctgaaggttctgaagatactctatgatattttcttctagaagttttattgtttaagctttaacatttagatctacaacacatctggaatcaatttttgtgtatggtgtgaggtagaggtcatatggttatcaactggctcagccctatttatccaaaaagatcatcttttgcttctcactgcactgaaatgttgcttttgtcataaaccaagttaccgtatatgtgtgaacttttcctgatttttccgtcttgttcttttggtctatttgtttttccttgcaagagtatgctgctttaattattattataataagccttgctctctggaaagtactctggctttttttgtttttgacaaagggaatttgttgacttatagaaccgagctatataactagcttcaggcataactggatccaggcactaaaatgaatctttagcaataccgctcatttcccatctgggctttacttttctgtatcttgacttccctctcaggcagaatctcttccctcacggtgacaaacagggcccacagcagctcgaagcttccatactatcattttaacaacctagcttatcattttaacaacctagcagaaaaggggtactgccttcctgaatggtgataccaaagtctcaaggttagctctcattggcccaacttgggtcacatgtccatttctatagtaaccatgtgtcttagtccatgttgtcttgctataaaggaaaacctgacgctgggtaatttttattttattttattattttttttttgagacaggatcttgctctgtcacctaggctggagtgcagtggcgcaatcttggctcactacaatgtccgcctcccaggtacaagtgattctcctgcctccagtgtagctggtatgacaggtgcccgccaccacacctggctaattttttgtatttttagtagagacagggtttcaccatgttagccaggctggtctcgaactcctgacctaaagtgatccacgaggctgggtaatttataaagagaaaaaggtgtatttggcttatgattctgctggctggaagattgggcatacagagaaagtctagagctacttccactcttggtggaaggagaaagaaagcagggatcatgtgacaatagaggaagcaagagaggcaagtgtcagcctctctttaacaaccaactctaatgggaactaatggaggaagaactcactcacccacactcccagggagggcattaatctatttgtgaggggtccacccctgtgacccaaacacctctcattaggaccccatctccaacattggggatccaatttcaagaacgaaatttagaaggcagcctggccaacacggggaaaccccgtctctcctaaaaatacaaaaattagccgggcgtggcatgtgcctataatcccagctactcaggaggcggaggcagaagggtcacttgaacccaggaggtggaggttgcactgagccaagattgtgcaactgcactccagcctgggtgacaaagcaaaactctgtctcaaaaaaaaaaaaaaaaaattggatgggacatacatccaaactactgcacatcataaccaaggtcatgaagtactcaggttggccaggtctgactcttgttctcactctgagatccctggcaagatccagtcaaaaaatgtatattttgcatggagaggagtgataggaaaatcagatgtttaagagaataaaaagagaagctatagattgtgagaaaatcttttcaaaacacctatcagacaaaaagctggtatccaggccaggtgtggtggctcacatctgtaatcccagcattttgagaggctgaggtgggcggatcacctgaggtcaggagtttgagagcagcctggccaacgtggcaaaaccctgtctctactaaaaatacaaaaattagcctggcatggtggtgggtgcctgtaatcccagctactcgggaggctgaagcaagagaatcacttgaacctgggaggcggaggtggcagtgagctaagattgcgccattgcactccagcctgggcaacagagcaagaccttgtctgaaaaaaaagaaaagaaagaaagaaaaagaaaaagagaaaagaaagctggtatacaaagaactaaaacttaacaataagaaaacaaacaacccgctccctctccatctccctctccctctccctctccctctcccatctccccacggtctccctctccctctctttccacagtctccctctccctctctttccacggtctccctctgatgccgagccgaagctggactgtactgctgccatctcggctcacgcaacctccctgcctgattctcctgcctcagcctgccaagtgcctgccattgcaggcacacgccgccacgcctgactggttttcgtatttttttggtggagacgggatttcgctgtgttggccaggccggtctccagctcctaaccgcgagtgatccgccagcctcggcctcccgaggtgccgggattgcagacggagtctggttcactcagtgctcaatggcgcccaggctggagtgcagtggcgtgatctcggctcgctacaacctccatctcccagccgcctgccttggcttcccaaagtgccaagattgcagcctctgcccggccaccaccccgtcggggaagtgaggagcatctctgcctggccgcccatcgtctgggacgtgaggagcccctctgcctggctgcccagtctggaaagtgaggagcgcctcttcccggctgccatcccatctaggaagtgaggagcacctcttcccggccgccatcccatctaggaagtgaggagcgtctctgcctggccgcccaccgtctgagatgtggggagcgcctctgccccgccgccccgtctggtatgtgaggagcgcctctacccggccgcgaccccgtctgggaggtgaggagcgtctctgcccggccgccccgtctgagaagtgaggagaccctccgcctggcaaccgccccgtctgagaagtgaggagcccctccgcccggtagccaccccgtctgggaagtgaggagagtctccgcccggcagccaccccatccgggagggaggtgggggtcagcccccgccaggccagcagccccgtccgggagggaggtgggggggtcagcccccctcccggccagccgccccgtctgggaggtgaggggcacctctgcccgaccgcccttactgggaagtgaggagcccctctgcccggccgcccctactgggaagtgaggagcccctctgcccggccaccaccccgtctgggagttgtacccaacagctcattgagaacaggccatgatgacaatggcggttttgtggaatagaaaggggggaaaagtggggaaaagattgagaaatcggatggttgccgtgtctgtgtagaaagaagtagacatgggagacttttcattttgttctgtactaagaaaaattcttctgccttgggatcctgttgatctgtgaccttacccccaaccctgtgctccctgaaacatgtgctgtgtccactcagggttaaatggattaagggcagtgcaagatgtgctttgttaaacagatgcttgaaggcagcatgctcgttaagagtcatcaccactccctaatctcaagtacccagggacacaaacactgcggaaggccgcagggtcctctgcctaagaaaaccagagacctttgtgcacttgtttatctgctgaccttccctccactattgtcctatgaccctgccaaatccccctctgcgagaaacacccaagaatgatcaattaaaaaaaaaaagaaaaaagaaaacaaacaacccaatttaaaaataggcaacagatctgaacagacacttcaacaaagaagatatgcagatggcaaataagtaaataaaaaggtgtggtggggtggctcctgcctgtaatcccaacactttgggaggctggggcaggaggatcatttgaggccaagagtttcagaccaacctaggcaacacattgagacgccatctctataaaaaataaaaagaaaaaggtcagatgttgtggctcacacctgcaatcccagcactttgggaggccacagctggtaattcccttgagctcaggaggtcaagaccagcccaggcaacgtggtgaaaccccatctctacgaaaaatacaaaaaattagccagatgtggtggtgcacacctgtggtctcagctacttggaagggtgaggtcggaggatcacttgagtctaggaggcagaggttgcagtcagcagagatcgtgccactgcattccagcctggatgacagagcgagaccctgtttctaaataaataaataaataaaataataaaaatagaaataaaaaaatagccaggtgtgacagcacacaactgtagtcccagctactggggaggccgagaaggaggatctaagagttggaggcggcagtgagctatgattgcactgctgtactccagcctgggcaacagagaccctgtttcttaaaataaataaataaacaaacaaacaaataaataaaaggtacttgggccgggcgtggtggctcacacctgtaatcccagcactttgggaggccaaggtgggcagatcacctgaggtcaggcattcgagaccagcctgatcaacatggagaaaccccatgtctactaaaaatacaaaattagccaggcgtggtggtgcatgcctgtaatcccagctacttgggaggctgagacaggagaatcacttgaacctgggaggcagatgttgcagtgagccgagatcatgccattgcacttcagcctcggcgacagagcaagactctgtctccaaaaaaaaagggggctcaacatcaaatgtcattaggaaattgcaaattaaagcaatgatgacatacgacaaccacctattagaatggtgaaaatccaaaacatgaataacaccaagtgctgatgaggatgaggaacgtcaggaactcttattcatctctggcagtaatgcaaaatggtgcagccactttagaagacaatttggcacttccttacaaaactaaacactcttaccatatattgcagcactcatgttccttggtatttactcaaatgagctcaaaacttatatccccacaaaaacctgaagacaaatattcatagcggctctgtacataattgccaaaacttggaagcaaccaagatgtccttcagtagatgaacaaactgcagtacatgcatacaatggaatattactcagttataataagccatgaaaagatatggaggaacctaaaatgcatattgttaagtgaaagaagccaatacgaaatcgctacatatggtatgattccaactataccacattctggaaaaggaaacactatagagacagttaaaaaaaatcattggtttttaggggtttgggaggagggaaggatgaatcagcagagcccagaggagttttaggacagtgaaactactctgcataatactataatggtggacacatgtcattataaatttgttcaaacccatagacaataaaacactaagagagaaactgaatgtaaactatggactttcctctcaattttgctgtgattttaaaactgaaaaaaaaaaaaaaaaaaaaaaaaaaaggcctggcgcggtggctcatgcctgtaattccagcactttgggaggccaaggtgggcagatcatgaggtcaggagatcgagaccatcttggataacacggtgaaaccccgtctctactaaaaatacaaacaattagccgggcgtgattgcgggcacctgtagtcccagctactcaggaggctgaggcaggagaatggtgtgaacccaggaggtggagcttgcggtgagctgagatcacgccactgcactccagcctgggtgacacaggaagactccatctcaaaaaaaaaaaaaaaaaaacaacaccaaaaaaatgctttattaaaaaaaaaaatagaatgtacaaggtatcacacaaggagtggaccttaatgtaaactgcagatttcagctaataataatgtatcaatattggcttattaattgtaacaaacgtagcacagtaacacaagatgttaacagggaagatgaggggcaatgaagggatgaaaggggatgtagaaactctcggtacttttcattcgattttttcctgtaaacctaagactgctccaaaaaaaattattaatgaagaagaaaatcagagataacagatgtcactcaggcaaaaatatcaggtgtccattataaggatccaagttgcccctaggtattcactctaataacagtttgcaacttggggtatgcagtatagaagggataaagaggctggcgcagtggttcacgcctgtaagcccagcagtctggaaagcggaggcgggcggatcacctgaggtcaggagttgaagaccagcctggccaaaatggggaaacctcgtctctattaaaaatacacaaaattgccagacatggtggcacgcgcctgtaatcccagctactgggtcgctgaggcaaaggaattgcttgaacctgggaggcgggggttgcagtgagccaaaattgcgccactgcactccagcctgggcaacagagtaagactccacctcaaaataaaaataaataaataaataaataattaaatttaaaaaaaggccaggtagcggtggctcacacctgtaatcccaccactttgggaggctgaggcgggcagatcacaaggtcaggagatagagaccatcctaacacagtgaaaccctttctctactaaaaatacaaagaattagctaggcgtggtggcacgtgcctgtagtcccagctactcgggaggctgaggcagatgaatcacttgaacccggaaggcagaggttgcagtcagccaagatcgcaccactgcccttgagcctcagcgacggagcaagactccatctcaaaaagaagccaaaaatacaaaaattagccaagtgtggtagtgtgcgcctgtaacctcagggtgagagaggagactctcttcaacccagaaggcagaggtcgagatcataagactgcactccaccctaggcaacagagcaagactccatctcaaaagatatattgcagtaatttaaaaacaattctattggaaacgcaatttcttcctgtcgagacctccctttatgacggaacaatgaaaaaacaatttttttcaattttgtccaggttagcttcaaacacatagcatcgccagcttgtgcgccaggacaacctgacggagccaccgaagctggtggaaaagtgctctcaatttttccatttgaccttctggggagcgatgtagccaatcacgagaggctcacccctgacatcacccagtccccagggacagagagggccctgcgttccatggcgccccctggagggaggaaggggaactgtatctgagagttcagtatctgacaataaggaaaaggcatagtagatcagatggtgcctactgttctggagagaagaaacaacggggttggggaatgcggagttgcagtttataatacaggcctcatgtataaggcagacctcatggggaaggtaacatctgtgcagagaaatggagatgagggctaggagccatgcaaatactggaacatgcttgccagcagaagtcgagaaacatggccggcgcagtggcccacacctgtaatcccaggactttgggaggccgaggcaggtagatcacgaggtcagcagttcgagaccagcctggccaacatggtgaaaccctgtctctactaaatatacaaaaattacccgggcatggggacgggtgcctgtaatcccagctgttcaggaggctgaggcaggggaatcgcttgaacccgggaggcggaggttgcagtgaacagagatcgtgtcactgcactccagcctgggtgatagagtgcgactccgtctgaaaaagaaaaaaaaaaaaaaagaattcaagggcaggccggtggttttagacggcaacctttaccgaagcctcagtgcacagccacagcagagggacacacacctgtatcttttctaagactgggagaattttacaattgcttgactaattgaacagtgcctcgaggatgttacactaggttataaataaattcctgccgtgtttagctgaggcacgaacacaatgcccactgacaattccactttcctcgagggccattctttatgaaaggctgtaggagttccacgacattgttgattcctggattctccaagtctctagaacttgagaactacttttgtgtatttttttaacctttaagttcagagtttctaatgtccgttttatactactataaaatggtactatgtattctttattgatggtactatttacactttattttatacagactctggctccacaaaaaggttaaaaattagccaggtgcagtggtgcacatctgcggccgcagctactcaggaggctgaggcagaaggattgcttgagctcggatggtcagggctgcaatgagctatgatcacacatcacatcaatgcactccagcctgggcaacggagtgagaccctgtctctaaaagaatagaagaggctgggcgcggtggctcacgcctgtcatcctaccactttgggagaccaaggcgagtggatcatttgaggccaggtgttcaagaccagcctggtcaacatggcgaaaccccatctcttggcaggcgactgtaatcccagctactcaggaggctgagataggagactcccttgaaccgacgaggcggaggttgcagtgagcgaagatcacaccactgcactccagcctgggcaacagagcaaggctcggtctcccaaaaaaaaaaaaaaaaaaagacacatggaagtaatttaaaaacacttaggaagatgtcatttcttcctatcaaggcgtcctccctttatgttttgtcgttatattgggaacgataaaaaaaatccttttttccgacccatgtggaccaggctggcctcgaactcgtgccctggaacccccgcctccgtgagggcccgagggcaggcgcaaccggcctgagccacaatggctccgggtgtcggggctgtcctttagtccctttgatcttacgcagggtgagggagccaatcaccagaggctcccccctgtcgtcacccagtccccagggccagtgagggccctgcgttccatggcgccccctggagggaggaaggggaactgtatctgagagttcagtatctgacaataaggaaaaggcatagtagatcagatggtgcctagtgttctggggagaagaaacaacggggttggggaatgcggagttgcagtttataatacaggcctcatgtataaggcagacctcatggggaaggtaacatctgtgcagagaaatggagatgagggctaggagccatgcaaatactggaacatgcttgccagcagaagtcgagaaacatggccggcgcagtggcccacacctgtaatcccaggactttgggaggccgaggcaggtagatcacgaggtcagcagttcgagaccagcccggccaacatggtgaaaccctgtctctactaaaaatacaaaaattagctgggtgtggtggcacacgcctgtaatcccagccacttgggagggtgaggtaggagaatcgcttgaacctgggaggtagaggttgcagtgatgcagtgagccgagaccacgccattgtactctcgcctgggcgacagagcgagactccatctcaaaaaaaaaaaaaaaaaaagcaaaaacaaacaggtgagattcattttgataaaatagctgatttaacctaatatacctaaaacatcataattttaacataatcaatagaaacatttttgcaagattttatgttattttttaccatacgacgtcttggaaatcttggtttggaccagccatgttcaactgctcagtagccatgtgtggccagaggcggccgtattggacagtgcagatggtgcatgagggtgttcgggcagtgggaacagccagtacagaggccctgtgggggcacatgcctgctgctacgggaacagtgaggagccccgtgtggctgcagtggagtgagagggagaaggtgggagatgtaaccaacagtctcatcattcattcattaaatccttttttttctttttttgagactgagtttcgctcttgttgcccaggctggagtgcaatggtgccatctcggctcaccacaacctccacctcttgagttcaagcgattctcctgcctcagccttccgagtagctgggattacaggcatgcgccaccatgcccggctaattttgtatttttagtagagctggggtttctccctgttggtcaggctggtctcgaactcccgacctcaggtgatctgcccgccttgacctcccaaagtgctgtgattacaggcttgagccactgctcccagtccattgaatgtgtgtatatatagttgaataaagaagacaccggagtttgttctgtatcttctcctttcaaattctgtgccatttgaattttttcctattccttttatatatttttaattgacaaattgtacatatttatcatgtacatattgttttgaaatatgtatataccgtagaatggctaaatcaagatcattaacatatgtattactttacctattttccttttttcgttgtgtctctgccaggtttcggtatcagaatgactctgacctcatagaatgagttagagagcagttgctcctcctcaattgtgtggaataatttcagtaggattggtgccggcttttctttacacatctggtaggattcgactgtgaatccgtctagtctaaggttttttgtgctggttggtaggttttgtatgactaactcaattttggaactcatcgttggtttgttcagggtttccatttcttcctggttcaatcttgagaggttttatgtttccaggaatttctctatttcttctagttttctagtttgtgtgcatagacgcatgtggaatagtctcagggtttcttgtatatctctgggtcagtggaaatgtcacctttgtcatttctgattgtgtttatttggatcttgtctttttttctttattaatctagctagtggtcttcccatgttatttatgctttcaaaaatatcaactttgtatgaattaacagcatttgccgtgacctggatgagaccggagactgttattctaagtgaagtaagtcaggaatggaaaaccaaacatcgtatgttctcactgatatgtgggagctaagctatgaggacgcaaaggcgtaagaatgatacaatggactttggggacttagggggacgagttggcgggggcgagggataaaatacaacaagtagggtgtagtgtatactgctcaggtgatgggtgcaccaaaatcacaaatcaccactaaagagcttatgtaaccacacaccacctgtaccccaataatttatggaataaataataaataaataatttttttaaaaaatcaactttgggtttcattgatcttttgtatggttttttacgtctccatttcattcaggtcagctccgatgttggtttttttttttcttctgctagctttggggttgatttgctcttgtttttctaattcctctaggtgtgatgttaggcggttcatttgagatctttctagcttcttagtgtagccctttagcactagaaacttcctttgagcactgttctagctgtgtcccagagattctgggatgttgtatgtttgttttcattagtttcagataatttttttatttctgccttaatttcagtctttacccaaaagtcatttggaagcaggttgtttaatttccatgccgactctaggccaggcatggtggctcatgcctgtaatcccagccacttgggaggctgaggcaggagaatcgcttgaatccaggaggcagaggtttcagtgagccaagatcacgccactgcactccagcccgggcgacagagtgaggctgcgtctcaaaaaaaaaaaaaaaaaaaaaattgccccttcttaagtttgcatttagatctcttctcctttgaccacttttaatttatcttcacttctgatatgacatttaatttttcattcattttctgtctattattgttccttttttaacttaaaaaaaattctgtactttatgaatttctgtttcaaggtgtttttcccatctccaaatgcttatttgaaaatgtttcctttcctcttggttcatttcttctggtgtgtgtgtgcgcgcgcccgcgtgcatgtgtgtactcgggtctcattttctgctttcttcctgcagtacttcgtttatgggagatgcacttcgcttttcttatttttttagtagagagggggtttcactggtttagccagaacagtctcgatctcctgacctcgtgatccgcccacctcgggctcccaaagtgctgggattccaggagtgagccaccgcgcccggccgtccactttgcttcttgcagaggctgatggtttgagtaatttccgagattcatagctcgagcgcgccctgttctgtctatgcagtgaagggcagctttttgcatccacggctttttgttggcaaggaggaatgtgcagtggccagatttgtttcttccccttttgttgctgttgttgttgttgctgctgctgttattgttgttgttgttgtattttattttgtagcatcctaaagtgtcccctccttctatttcttatccttatccaggtagggtttagaaaagctaacttcaggggcaggggagagagagaaagagaggaagagaaaatgagaatgaatgacaatacatgaacccatgggtcaacctttatttcaaggcagcccaaaaggacggctctcccttctctttcactctcttctctaggtgtgaagctgatgcagcacaggcgagccccaaaattgaggcttagcccgggggggttcttggcttctcctagaaactaattcaagaagccgggcgcagtggctcacgcctgtaatcccagcactttgggaggctgaggcggatggatcacttgaggtaaggagttcgagaccagcctggccaacatggtgaaaccccatctctactaaatatacaaaaattacccgggcatggggacgggtgcctgtaatcccagctgttcaggaggctgaggcaggggaatcgcttgaacccgggaggcggaggttgcagtgaacagagatcgtgtcactgcactccagcctgggtgatagagtgcgactccgtctgaaaaagaaaaaaataattcaagggcaggccggtggttttagacggcaacctttaccgaagcctcagtgcacagccacagcagagggacacacacctgtatcttttctaagactgggagaattttacaattgcttgactaattgaacagtgcctcgaggatgttacactaggttataaataaattcctgccgtgtttagctgaggcacgaacacaatgcccactgacaattccactttcctcgagggccattctttatgaaaggctgtaggagttccacgacattgttgattcctggattctccaagtctctagaacttgagaactacttttgtgtatttttttaacctttaagttcagagtttctaatgtccgttttatactactataaaatggtactatgtattctttattgatggtactatttacactttattttatacagactctggctccacaaaaaggttaaaaattagccaggtgcagtggtgcacatctgcggccccagctactcaggaggctgaggcagaaggattgcttgagctcggatggtcagggctgcaatgagctatgatcacacatcacatcaatgcactccagcctgggcaacagagtgagaccctgtctctaaaagaatagaagaggctgggcgcggtggctcacgcctgtcatcctaccactttgggagaccaaggcgagtggatcatttgaggccaggtgttcaagaccagcctggtcaacatggcgaaaccccatctcttggcaggcgactgtaatcccagctactcaggaggctgagataggagactcccttgaaccgacgaggcggaggttgcagtgagcgaagatcacaccactgcactccagcctgggcaacagagcaaggctcggtctcccaaaaaaaaaaaaaaaaaaagacacatggaagtaatttaaaaacacttaggaagatgtcatttcttcctatcaaggcgtcctccctttatgttttgtcgttatattgggaacgataaaaaaaatccttttttccgacccatgtggaccaggctggcctcgaactcgtgccctggaacccccgcctccgtgagggcccgagggcaggcgcaaccggcctgagccacaatggctccgggtgtcggggctgtcctttagtccctttgatcttacgcagggtgagggagccaatcaccagaggctcccccctgtcgtcacccagtccccagggccagtgagggccctgcgttccatggcgccccctggagggaggaaggggaactgtatctgagagttcagtatctgacaataaggaaaaggcatggtagatcagatggtgcctagtgttctggggagaagaaacaacggggttggggaatgcggagttgcagtttataatacaggcctcatgtataaggcagacctcatggggaaggtaacatctgtgcagagaaatggagatgagggctaggagccatgcaaatactggaacatgcttgccagcagaagtcgagaaacaaggctggcgcagtggcccacacctgtaatcccaggactttgggaggccgaggcaggtagatcacgaggtcagcagttcgagaccagcctggccaacatggtgaaaccctgtctctactaaaaatacaaaaattagctgggtgtggtggcacacgcctgtaatcccagccacttgggaggctgaggcaggagaatcgcttgaatccaggaggcagaggtttcagtgagccaagatcacgccactgcactccagcccgggcgacacagtgaggctgcgtctcaaaaaaaaaaaaaaaaaaaaaaaaattgccccttcttaagtttgcatttagatctcttctcctttgaccacttttaatttatcttcacttctgatatgacatttaatttttcattcattttctgtctattattgttcgttttttaacttaaaaaaaaattctgtactttatgaatttctgtttcaaggtgtttttcccatctccaaatgcttatttggaaatgtttcctttcctcttggttcatttcttctggtgtgtgtgtgcgcgcgcccgcgtgcatgtgtgtactcgggtctcattttctgctttcttcctgcagtacctcgtttatgggagatgcacttcgcttttcttatttttttagtagagagggggtttcactggtttagccagaacagtctcgatctcctgaccttgtgatccgcccacctcgggctcccaaagtgctgggattccaggagtgagccaccgtgcccggccgtccactttgcttcttgcagaggctgatggtttgagtaatttccgagattcatagctcgagcgcgccctgttctgtctatgcagtgaagggcagctttttgcatccacggctttttgttggcaaggaggaatgtgcagtggccagatttgtttcttccccttttgttgctgttgttgttgttgctgctgctgttattgttgttgttgttgtattttattttgtagcatcctaaagtgtcccctccttctatttcttatccttatccaggtagggtttagaaaagctaacttcaggggcaggggagagagagaaagagaggaggagaaaatgagaatgaatgacaatacatgaacccatgggtcaacctttatttcaaggcagcccaaaaggacggctctcccttctctttcactctcttctctaggtgtgaagctgatgcagcacaggcgagccccaaaattgaggcttagcccgggggggttcttggcttctcctagaaactaattcaagaagccgggcgcagtggctcacgcctgtaatcccagcactttgggaggctgaggcggatggatcacttgaggtaaggagttcgagaccagcctggccaacatggtgaaaccccatctctactaaatatacaaaaattacccgggcatggggacgggtgcctgtaatcccagctgttcaggaggctgaggcaggggaatcgcttgaacccgggaggcggaggttgcagtgaacagagatcgtgtcactgcactccagcctgggtgatagagtgcgactccgtctgaaaaagaaaaaaagaattcaagggcaggccggtggttttagacggcaacctttaccgaagcctcagtgcacagccacagcagagggacacacacctgtatcttttctaagactgggagaattttacaattgcttgactaattgaacagtgcctcgaggatgttacactaggttataaataaattcctgccgtgtttagctgaggcacgaacacaatgcccactgacaattccactttcctcgagggccattctttatgaaaggctgtaggagttccacgacattgttgattcctggattctccaagtctctagaacttgagaactacttttgtgtatttttttaacctttaagttcagagtttctaatgtccgttttatactactataaaatggtactatgtattctttattgatggtactatttacactttattttatacagactctggctccacaaaaaggttaaaaattagccaggtgcagtggtgcacatctgcggccccagctactcaggaggctgaggcagaaggattgcttgagctcggatggtcagggctgcaatgagctatgatcacacatcacatcaatgcactccagcctgggcaacggagtgagaccctgtctctaaaagaatagaagaggctgggcgcggtggctcacgcctgtcatcctaccactttgggagaccaaggcgagtggatcatttgaggccaggtgttcaagaccagcctggtcaacatggcgaaaccccatctcttggcaggcgactgtaatcccagctactcaggaggctgagataggagactcccttgaaccgacgaggcggaggttgcagtgagcgaagatcacaccactgcactccagcctgggcaacagagcaaggctcggtctcccaaaaaaaaaaaaaaaaaaagacacatggaagtaatttaaaaacacttaggaagatgtcatttcttcctatcaaggcgtcctccctttatgttttgtcgttatattgggaacgataaaaaaaatccttttttccgacccatgtggaccaggctggcctcgaactcgtgccctggaacccccgcctccgtgagggcccgagggcaggcgcaaccggcctgagccacaatggctccgggtgtcggggctgtcctttagtccctttgatcttacgcagggtgagggagccaatcaccagaggctcccccctgtcgtcacccagtccccagggccagtgagggccctgcgttccatggcgccccctggagggaggaaggggaactgtatctgagagttcagtatctgacaataaggaaaaggcatggtagatcagatggtgcctagtgttctggggagaagaaacaacggggttggggaatgcggagttgcagtttataatacaggcctcatgtataaggcagacctcatggggaaggtaacatctgtgcagagaaatggagatgagggctaggagccatgcaaatactggaacatgcttgccagcagaagtcgagaaacaaggctggcgcagtggcccacacctgtaatcccaggactttgggaggccgaggcaggtagatcacgaggtcagcagttcgagaccagcctggccaacatggtgaaaccctgtctctactaaaaatacaaaaattagctgggtgtggtggcacacgcctgtaatcccagccacttgggaggctgaggcaggagaatcgcttgaatccaggaggcagaggtttcagtgagccaagatcacgccactgcactccagcccgggcgacacagtgaggctgcgtctcaaaaaaaaaaaaaaaaaaaaaaaaattgccccttcttaagtttgcatttagatctcttctcctttgaccacttttaatttatcttcacttctgatatgacatttaatttttcattcattttctgtctattattgttcgttttttaacttaaaaaaaaattctgtactttatgaatttctgtttcaaggtgtttttcccatctccaaatgcttatttggaaatgtttcctttcctcttggttcatttcttctggtgtgtgtgtgcgcgcgcccgcgtgcatgtgtgtactcgggtctcattttctgctttcttcctgcagtacctcgtttatgggagatgcacttcgcttttcttatttttttagtagagagggggtttcactggtttagccagaacagtctcgatctcctgacctcgtgatccgcccacctcgggctcccaaagtgctgggattccaggagtgagccaccgcgcccggccgtccactttgcttcttgcagaggctgatggtttgagtaatttccgagattcatagctcgagcgcgccctgttctgtctatgcagtgaagggcagctttttgcatccacggctttttgttggcaaggaggaatgtgcagtggccagatttgtttcttccccttttgttgctgttgttgttgttgctgctgctgttattgttgttgttgttgtattttattttgtagcatcctaaagtgtcccctccttctatttcttatccttatccaggtagggtttagaaaagctaacttcaggggcaggggagagagagaaagagaggaagagaaaatgagaatgaatgacaatacatgaacccatgggtcaacctttatttcaaggcagcccaaaaggacggctctcccttctctttcactctcttctctaggtgtgaagctgatgcagcacaggcgagccccaaaattgaggcttagcccgggggggttcttggcttctcctagaaactaattcaagaagccgggcgcagtggctcacgcctgtaatcccagcactttgggaggctgaggcggatggatcacttgaggtaaggagttcgagaccagcctggccaacatggtgaaaccccatctctactaaatatacaaaaattacccgggcatggggacgggtgcctgtaatcccagctgttcaggaggctgaggcaggggaatcgcttgaacccgggaggcggaggttgcagtgaacagagatcgtgtcactgcactccagcctgggtgatagagtgcgactccgtctgaaaaaaaaaaaaagaattcaagggcaggccggtggttttagacggcaacctttaccgaagcctcagtgcacagccacagcagagggacacacacctgtatcttttctaagactgggagaattttacaattgcttgactaattgaacagtgcctcgaggatgttacactaggttataaataaattcctgccgtgtttagctgaggcacgaacacaatgcccactgacaattccactttcctcgagggccattctttatgaaaggctgtaggagttccacgacattgttgattcctggattctccaagtctctagaacttgagaactacttttgtgtatttttttaacctttaagttcagagtttctaatgtccgttttatactactataaaatggtactatgtattctttattgatggtactatttacactttattttatacagactctggctccacaaaaaggttaaaaattagccaggtgcagtggtgcacatctgcggccccagctactcaggaggctgaggcagaaggattgcttgagctcggatggtcagggctgcaatgagctatgatcacacatcacatcaatgcactccagcctgggcaacggagtgagaccctgtctctaaaagaatagaagaggctggccgcggtggctcacgcctgtcatcctaccactttgggagaccaaggcgagtggatcatttgaggccaggtgttcaagaccagcctggtcaacatggcgaaaccccatctcttggcaggcgactgtaatcccagctactcaggaggctgagataggagactcccttgaaccgacgaggcggaggttgcagtgagcgaagatcacaccactgcactccagcctgggcaacagagcaaggctcggtctcccaaaaaaaaaaaaaaaaaagacacatggaagtaatttaaaaacacttaggaagatgtcatttcttcctatcaaggcgtcctccctttatgttttgtcgttatattgggaacgataaaaaaaatccttttttccgacccatgtggaccaggctggcctcgaactcgtgccctggaacccccgcctccgtgagggcccgagggcaggcgcaaccggcctgagccacaatggctccgggtgtcggggctgtcctttagtccctttgatcttacgcagggtgagggagccaatcaccagaggctcccccctgtcgtcacccagtccccagggccagtgagggccctgcgttccatggcgccccctggagggaggaaggggaactgtatctgagagttcagtatctgacaataaggaaaaggcatggtagatcagatggtgcctagtgttctggggagaagaaacaacggggttggggaatgcggagttgcagtttataatacaggcctcatgtataaggcagacctcatggggaaggtaacatctgtgcagagaaatggagatgagggctaggagccatgcaaatactggaacatgcttgccagcagaagtcgagaaacaaggctggcgcagtggcccacacctgtaatcccaggactttgggaggccgaggcaggtagatcacgaggtcagcagttcgagaccagcctggccaacatggtgaaaccctgtctctactaaaaatacaaaaattagctgggtgtggtggcacacgcctgtaatcccagccacttgggaggctgaggcaggagaatcgcttgaatccaggaggcagaggtttcagtgagccaagatcacgccactgcactccagcccgggcgacacagtgaggctgcgtctcaaaaaaaaaaaaaaaaaaaaaaaattgccccttcttaagtttgcatttagatctcttctcctttgaccacttttaatttatcttcacttctgatatgacatttaatttttcattcattttctgtctattattgttcgttttttaacttaaaaaaaaattctgtactttatgaatttctgtttcaaggtgtttttcccatctccaaatgcttatttggaaatgtttcctttcctcttggttcatttcttctggtgtgtgtgtgcgcgcgcccgcgtgcatgtgtgtactcgggtctcattttctgctttcttcctgcagtacctcgtttatgggagatgcacttcgcttttcttatttttttagtagagagggggtttcactggtttagccagaacagtctcgatctcctgacctcgtgatccgcccacctcgggctcccaaagtgctgggattccaggagtgagccaccgcgcccggccgtccactttgcttcttgcagaggctgatggtttgagtaatttccgagattcatagctcgagcgcgccctgttctgtctatgcagtgaagggcagctttttgcatccacggctttttgttggcaaggaggaatgtgcagtggccagatttgtttcttccccttttgttgctgttgttgttgttgctgctgctgttattgttgttgttgttgtattttattttgtagcatcctaaagtgtcccctccttctatttcttatccttatccaggtagggtttagaaaagctaacttcaggggcaggggagagagagaaagagaggaagagaaaatgagaatgaatgacaatacatgaacccatgggtcaacctttatttcaaggcagcccaaaaggacggctctcccttctctttcactctcttctctaggtgtgaagctgatgcagcacaggcgagccccaaaattgaggcttagcccgggggggttcttggcttctcctagaaactaattcaagaagccgggcgcagtggctcacgcctgtaatcccagcactttgggaggctgaggcggatggatcacttgaggtaaggagttcgagaccagcctggccaacatggtgaaaccccatctctactaaatatacaaaaattacccgggcatggggacgggtgcctgtaatcccagctgttcaggaggctgaggcaggggaatcgcttgaacccgggaggcggaggttgcagtgaacagagatcgtgtcactgcactccagcctgggtgatagagtgcgactccgtctgaaaaaaaaaaaaagaattcaagggcaggccggtggttttagacggcaacctttaccgaagcctcagtgcacagccacagcagagggacacacacctgtatcttttctaagactgggagaattttacaattgcttgactaattgaacagtgcctcgaggatgttacactaggttataaataaattcctgccgtgtttagctgaggcacgaacacaatgcccactgacaattccactttcctcgagggccattctttatgaaaggctgtaggagttccacgacattgttgattcctggattctccaagtctctagaacttgagaactacttttgtgtatttttttaagttcagagtttctaatgtccgttttatactactataaaatggtactatgtattctttattgatggtactatttacactttattttatacagactctggctccacaaaaaggttaaaaattagccaggtgcagtggtgcacatctgcggccccagctactcaggaggctgaggcagaaggattgcttgagctcggatggtcagggctgcaatgagctatgatcacacatcacatcaatgcactccagcctgggcaacagagtgagaccctgtctctaaaagaatagaagaggctgggcgcggtggctcacgcctgtcatcctaccactttgggagaccaaggcgagtggatcatttgaggccaggtgttcaagaccagcctggtcaacatggcgaaaccccatctcttggcaggcgactgtaatcccagctactcaggaggctgagataggagactcccttgaaccgacgaggcggaggttgcagtgagcgaagatcacaccactgcactccagcctgggcaacagagcaaggctcggtctcccaaaaaaaaaaaaaaaaaaaaagacacatggaagtaatttaaaaacacttaggaagatgtcatttcttcctatcaaggcgtcctccctttatgttttgtcgttatattgggaacgataaaaaaaatccttttttccgacccatgtggaccaggctggcctcgaactcgtgccctggaacccccgcctccgtgagggcccgagggcaggcgcaaccggcctgagccacaatggctccgggtgtcggggctgtcctttagtccctttgatcttacgcagggtgagggagccaatcaccagaggctcccccctgtcgtcacccagtccccagggccagtgagggccctgcgttccatggcgccccctggagggaggaaggggaactgtatctgagagttcagtatctgacaataaggaaaaggcatagtagatcagatggtgcctagtgttctggggagaagaaacaacggggttggggaatgcggagttgcagtttataatacaggcctcatgtataaggcagacctcatggggaaggtaacatctgtgcagagaaatggagatgagggctaggagccatgcaaatactggaacatgcttgccagcagaagtcgagaaacatggccggcgcagtggcccacacctgtaatcccaggactttgggaggccgaggcaggtagatcacgaggtcagcagttcgagaccagcccggccaacatggtgaaaccctgtctctactaaaaatacaaaaattagctgggtgtggtggcacacgcctgtaatcccagccacttgggagggtgaggtaggagaatcgcttgaacctgggaggtagaggttgcagtgatgcagtgagccgagaccacgccattgtactctcgcctgggcgacagagcgagactccatctcaaaaaaaaaaaaaaaaaaaaaaaaaaaaagcaaaaacaaacaggtgagattcattttgataaaatagctgatttaacctaatatacctaaaacatcataattttaacataatcaatagaaacatttttgcaagattttatgttattttttaccatacgacgtcttggaaatcttggtttggaccagccatgttcaactgctcagtagccatgtgtggccagaggcggccgtattggacagtgcagatggtgcatgagggtgttcgggcagtgggaacagccagtacagaggccctgtgggggcacatgcctgctgctacgggaacagtgaggagccccgtgtggctgcagtggagtgagagggagaaggtgggagatgtaaccaacagtctcatcattcattcattaaatccttttttttctttttttgagactgagtttcgctcttgttgcccaggctggagtgcaatggtgccatctcggctcaccacaacctccacctcttgagttcaagcgattctcctgcctcagccttccgagtagctgggattacaggcatgcgccaccatgcccggctaattttgtatttttagtagagctggggtttctccctgttggtcaggctggtctcgaactcccgacctcaggtgatctgcccgccttgacctcccaaagtgctgtgattacaggcttgagccactgctcccagtccattgaatgtgtgtatatatagttgaataaagaagacaccggagtttgttctgtatcttctcctttcaaattctgtgccatttgaattttttcctattccttttatatatttttaattgacaaattgtacatatttatcatgtacatattgttttgaaatatgtatataccgtagaatggctaaatcaagatcattaacatatgtattactttacctattttccttttttcgttgtgtctctgccaggtttcggtatcagaatgactctgacctcatagaatgagttagagagcagttgctcctcctcaattgtgtggaataatttcagtaggattagtgccgccttttctttacacgtctggtaggattcgactgtgaatccgtctagtctaaggttttttgtgctggttggtaggttttgtatgactaactcaattttggaactcatcgttggtttgttcagggtttccatttcttcctggttcaatcttgagaggttttatgtttccaggaatttctctatttcttctagttttctagtttgtgtgcatagaggcatgtggaatagtctcagggtttcttgtatatctgtgggtcagtggtaatgtcacctttgtcatttctgattgtgtttatttggatcttgtctttttttctttattaatctagctagtggtcttcccatgttatttatgctttcaaaaatatcaactttgtatgaattaacagcatttgccgtgacctggatgagaccggagactgttattctaagtgaagtaagtcaggaatggaaaaccaaacatcgtatgttctcactgatatgtgggagctaagctatgaggacgcaaaggcgtaagaatgatacaatggactttggggacttagggggacgagttggcgggggcgagggataaaatacaacaagtagggtgtagtgtatactgctcaggtgatgggtgcaccaaaatcacaaatcaccactaaagagcttatgtaaccacacaccacctgtaccccaataatttatggaataaataataaataaataatttttttaaaaaatcaactttgggtttcattgatcttttgtatggttttttacgtctccatttcattcaggtcagctccgatgttggtttttttttttcttctgctagctttggggttgatttgctcttgtttttctaattcctctaggtgtgatgttaggcggttcatttgagatctttctagcttcttagtgtagccctttagcactagaaacttcctttgagcactgttctagctgtgtcccagagattctgggatgttgtatgtttgttttcattagtttcagataatttttttatttctgccttaatttcagtctttacccaaaagtcatttggaagcaggttgtttaatttccatgatgactctaggccgggcatggtggctcatgcctgtaatcccagccacttgggaggctgaggcaggagaatcgcttgaatccaggaggcagaggtttcagtgagccaagatcacgccactgcactccagcccgggcgacagagtgaggctgcgtctcaaaaaaaaaaaaaaaaaaaaaaaattgccccttcttaagtttgcatttagatctcttctcctttgaccacttttaatttatcttcacttctgatatgacatttaatttttcattcattttctgtctattattgttccttttttaacttaaaaaaaattctgtactttatgaatttctgtttcaaggtgtttttcccatctccaaatgcttatttgaaaatgtttcctttcctcttggttcatttcttctggtgtgtgtgtgcgcgcgcccgcgtgcatgtgtgtactcgggtctcattttctgctttcttcctgcagtacctcgtttatgggagatgcacttcgcttttgttatttttttagtagagagggggtttcactggtttagccagaacagtctcgatctcctgacctcgtgatccgcccacctcgggctcccaaagtgctgggattccaggagtgagccaccgcgcccggccgtccactttgcttcttgcagaggctgatggtttgagtaatttccgagattcatagctcgagcgcgccctgttctgtctatgcagtgaagggcagctttttgcatccacggctttttgttggcaaggaggaatgtgcagtggccagatttgtttcttccccttttgttgctgttgttgttgttgctgctgctgttattgttgttgttgttgtattttattttgtagcatcctaaagtgtcccctccttctatttcttatccttatccaggtagggtttagaaaagctaacttcaggggcaggggagagagagaaagagaggaagagaaaatgagaatgaatgacaatacatgaacccatgggtcaacctttatttcaaggcagcccaaaaggacggctctcccttctctttcactctcttctctaggtgtgaagctgatgcagcacaggcgagccccaaaattgaggcttagcccgggggggttcttggcttctcctagaaactaattcaagaagccgggcgcagtggctcacgcctgtaatcccagcactttgggaggctgaggcggatggatcacttgaggtaaggagttcgagaccagcctggccaacatgctgaaaaccccatctctactaaatatacaaaaattacccgggcatggggacgggtgcctgtaatcccagctgttcaggaggctgaggcaggggaatcgcttgaacccgggaggcggaggttgcagtgaacagagatcgtgtcactgcactccagcctgggtgatagagtgcgactccgtctgaaaaaaaaaaaaaaagaattcaagggccggccggtggttttagacggcaacctttaccgaagcctcagtgcacagccacagcagagggacacacacctgtatcttttctaagactgggagaattttacaattgcttgactaattgaacagtgcctcgaggatgttacactaggttataaataaattcctgccgtgtttagctgaggcacgaacacaatgcccactgacaattccactttcctcgagggccattctttatgaaaggctgtaggagttccacgacattgttgattcctggattctccaagtctctagaacttgagaactacttttgtgtatttttttaacctttaagttcagagtttctaatgtccgttttatactactataaaatggtactatgtattctttattgatggtactatttacactttattttatacagactctggctccacaaaaaggttaaaaattagccaggtgcagtggtgcacatctgcggccccagctactcaggaggctgaggcagaaggattgcttgagctcggatggtcagggctgcaatgagctatgatcacacatcacatcaatgcactccagcctgggcaacagagtgagaccctgtctctaaaagaatagaagaggctgggcgcggtggctcacgcctgtcatcctaccactttgggagaccaaggcgagtggatcatttgaggccaggtgttcaagaccagcctggtcaacatggcgaaaccccatctcttggcaggcgactgtaatcccagctactcaggaggctgagataggagactcccttgaaccgacgaggcggaggttgcagtgagcgaagatcacaccactgcactccagcctgggcaacagagcaaggctcggtctcccaaaaaaaaaaaaaaaaaaaaagacacatggaagtaatttaaaaacacttaggaagatgtcatttcttcctatcaaggcgtcctccctttatgttttgtcgttatattgggaacgataaaaaaaatccttttttccgacccatgtggaccaggctggcctcgaactcgtgccctggaacccccgcctccgtgagggcccgagggcaggcgcaaccggcctgagccacaatggctccgggtgtcggggctgtcctttagtccctttgatcttacgcagggtgagggagccaatcaccagaggctcccccctgtcgtcacccagtccccagggccagtgagggccctgcgttccatggcgccccctggagggaggaaggggaactgtatctgagagttcagtatctgacaataaggaaaaggcatagtagatcagatggtgcctagtgttctggggagaagaaacaacggggttggggaatgcggagttgcagtttataatacaggcctcatgtataaggcagacctcatggggaaggtaacatctgtgcagagaaatggagatgagggctaggagccatgcaaatactggaacatgcttgccagcagaagtcgagaaacatggccggcgcagtggcccacacctgtaatcccaggactttgggaggccgaggcaggtagatcacgaggtcagcagttcgagaccagcccggccaacatggtgaaaccctgtctctactaaaaatacaaaaattagctgggtgtggtggcacacgcctgtaatcccagccacttgggagggtgaggtaggagaatcgcttgaacctgggaggtagaggttgcagtgatgcagtgagccgagaccacgccattgtactctcgcctgggcgacagagcgagactccatctcaaaaaaaaaaaaaaaaaaaaaaaaaaaaagcaaaaacaaacaggtgagattcattttgataaaatagctgatttaacctaatatacctaaaacatcataattttaacataatcaatagaaacatttttgcaagattttatgttattttttaccatacgacgtcttggaaatcttggtttggaccagccatgttcaactgctcagtagccatgtgtggccagaggcggccgtattggacagtgcagatggtgcatgagggtgttcgggcagtgggaacagccagtacagaggccctgtgggggcacatgcctgctgctacgggaacagtgaggagccccgtgtggctgcagtggagtgagagggagaaggtgggagatgtaaccaacagtctcatcattcattcattaaatccttttttttctttttttgagactgagtttcgctcttgttgcccaggctggagtgcaatggtgccatctcggctcaccacaacctccacctcttgagttcaagcgattctcctgcctcagccttccgagtagctgggattacaggcatgcgccaccatgcccggctaattttgtatttttagtagagctggggtttctccctgttggtcaggctggtctcgaactcccgacctcaggtgatctgcccgccttgacctcccaaagtgctgtgattacaggcttgagccactgctcccagtccattgaatgtgtgtatatatagttgaataaagaagacaccggagtttgttctgtatcttctcctttcaaattctgtgccatttgaattttttcctattccttttatatatttttaattgacaaattgtacatatttatcatgtacatattgttttgaaatatgtatataccgtagaatggctaaatcaagatcattaacatatgtattactttacctattttccttttttcgttgtgtctctgccaggtttcggtatcagaatgactctgacctcatagaatgagttagagagcagttgctcctcctcaattgtgtggaataatttcagtaggattggtgccgccttttctttacacgtctggtaggattcgactgtgaatccgtctagtctaaggttttttgtgctggttggtaggttttgtatgactaactcaattttggaactcatcgttggtttgttcagggtttccatttcttcctggttcaatcttgagaggttttatgtttccaggaatttctctatttcttctagttttctagtttgtgtgcatagaggcatgtggaatagtctcagggtttcttgtatatctgtgggtcagtggtaatgtcacctttgtcatttctgattgtgtttatttggatcttgtctttttttctttattaatctagctagtggtcttcccatgttatttatgctttcaaaaatatcaactttgtatgaattaacagcatttgccgtgacctggatgagaccggagactgttattctaagtgaagtaagtcaggaatggaaaaccaaacatcgtatgttctcactgatatgtgggagctaagctatgaggacgcaaaggcgtaagaatgatacaatggactttggggacttagggggacgagttggcgggggcgagggataaaatacaacaagtagggtgtagtgtatactgctcaggtgatgggtgcaccaaaatcacaaatcaccactaaagagcttatgtaaccacacaccacctgtaccccaataatttatggaataaataataaataaataatttttttaaaaaatcaactttgggtttcattgatcttttgtatggttttttacgtctccatttcattcaggtcagctccgatgttggtttttttttttcttctgctagctttggggttgatttgctcttgtttttctaattcctctaggtgtgatgttaggcggttcatttgagatctttctagcttcttagtgtagccctttagcactagaaacttcctttgagcactgttctagctgtgtcccagagattctgggatgttgtatgtttgttttcattagtttcagataatttttttatttctgccttaatttcagtctttacccaaaagtcatttggaagcaggttgtttaatttccatgatgactctaggccgggcatggtggctcatgcctgtaatcccagccacttgggaggctgaggcaggagaatcgcttgaatccaggaggcagaggtttcagtgagccaagatcacgccactgcactccagcccgggcgacagagtgaggctgcgtctcaaaaaaaaaaaaaaaaaaaaaaattgccccttcttaagtttgcatttagatctcttctcctttgaccacttttaatttatcttcacttctgatatgacatttaatttttcattcattttctgtctattattgttccttttttaacttaaaaaaaattctgtactttatgaatttctgtttcaaggtgtttttcccatctccaaatgcttatttgaaaatgtttcctttcctcttggttcatttcttctggtgtgtgtgtgcacgcgcccgcgtgcatgtgtgtactcgggtctcattttctgctttcttcctgcagtacctcgtttatgggagatgcacttcgcttttgttatttttttagtagagagggggtttcactggtttagccagaacagtctcgatctcctgacctcgtgatccgcccacctcgggctcccaaagtgctgggattccaggagtgagccaccgcgcccggccgtccactttgcttcttgcagaggctgatggtttgagtaatttccgagattcatagctcgagcgcgccctgttctgtctatgcagtgaagggcagctttttgcatccacggctttttgttggcaaggaggaatgtgcagtggccagatttgtttcttccccttttgttgctgttgttgttgttgctgctgctgttattgttgttgttgttgtattttattttgtagcatcctaaagtgtcccctccttctatttcttatccttatccaggtagggtttagaaaagctaacttcaggggcaggggagagagagaaagagaggaagagaaaatgagaatgaatgacaatacatgaacccatgggtcaacctttatttcaaggcagcccaaaaggacggctctcccttctctttcactctcttctctaggtgtgaagctgatgcagcacaggcgagccccaaaattgaggcttagcccgggggggttcttggcttctcctagaaactaattcaagaagccgggcgcagtggctcacgcctgtaatcccagcactttgggaggctgaggcggatggatcacttgaggtaaggagttcgagaccagcctggccaacatgctgaaaaccccatctctactaaatatacaaaaattacccgggcatggggacgggtgcctgtaatcccagctgttcaggaggctgaggcaggggaatcgcttgaacccgggaggcggaggttgcagtgaacagagatcgtgtcactgcactccagcctgggtgatagagtgcgactccgtctgaaaaaaaaaaaaaaagaattcaagggccggccggtggttttagacggcaacctttaccgaagcctcagtgcacagccacagcagagggacacacacctgtatcttttctaagactgggagaattttacaattgcttgactaattgaacagtgcctcgaggatgttacactaggttataaataaattcctgccgtgtttagctgaggcacgaacacaatgcccactgacaattccactttcctcgagggccattctttatgaaaggctgtaggagttccacgacattgttgattcctggattctccaagtctctagaacttgagaactacttttgtgtatttttttaacctttaagttcagagtttctaatgtccgttttatactactataaaatggtactatgtattctttattgatggtactatttacactttattttatacagactctggctccacaaaaaggttaaaaattagccaggtgcagtggtgcacatctgcggccccagctactcaggaggctgaggcagaaggattgcttgagctcggatggtcagggctgcaatgagctatgatcacacatcacatcaatgcactccagcctgggcaacagagtgagaccctgtctctaaaagaatagaagaggctgggcgcggtggctcacgcctgtcatcctaccactttgggagaccaaggcgagtggatcatttgaggccaggtgttcaagaccagcctggtcaacatggcgaaaccccatctcttggcaggcgactgtaatcccagctactcaggaggctgagataggagactcccttgaaccgacgaggcggaggttgcagtgagcgaagatcacaccactgcactccagcctgggcaacagagcaaggctcggtctcccaaaaaaaaaaaaaaaaaaaagacacatggaagtaatttaaaaacacttaggaagatgtcatttcttcctatcaaggcgtcctccctttatgttttgtcgttatattgggaacgataaaaaaaatccttttttccgacccatgtggaccaggctggcctcgaactcgtgccctggaacccccgcctccgtgagggcccgagggcaggcgcaaccggcctgagccacaatggctccgggtgtcggggctgtcctttagtccctttgatcttacgcagggtgagggagccaatcaccagaggctcccccctgtcgtcacccagtccccagggccagtgagggccctgcgttccatggcgccccctggagggaggaaggggaactgtatctgagagttcagtatctgacaataaggaaaaggcatagtagatcagatggtgcctagtgttctggggagaagaaacaacggggttggggaatgcggagttgcagtttataatacaggcctcatgtataaggcagacctcatggggaaggtaacatctgtgcagagaaatggagatgagggctaggagccatgcaaatactggaacatgcttgccagcagaagtcgagaaacatggccggcgcagtggcccacacctgtaatcccaggactttgggaggccgaggcaggtagatcacgaggtcagcagttcgagaccagcccggccaacatggtgaaaccctgtctctactaaaaatacaaaaattagctgggtgtggtggcacacgcctgtaatcccagccacttgggagggtgaggtaggagaatcgcttgaacctgggaggtagaggttgcagtgatgcagtgagccgagaccacgccattgtactctcgcctgggcgacagagcgagactccatctcaaaaaaaaaaaaaaaaaaaaaaaaaaagcaaaaacaaacaggtgagattcattttgataaaatagctgatttaacctaatatacctaaaacatcataattttaacataatcaatagaaacatttttgcaagattttatgttattttttaccatacgacgtcttggaaatcttggtttggaccagccatgttcaactgctcagtagccatgtgtggccagaggcggccgtattggacagtgcagatggtgcatgagggtgttcgggcagtgggaacagccagtacagaggccctgtgggggcacatgcctgctgctacgggaacagtgaggagccccgtgtggctgcagtggagtgagagggagaaggtgggagatgtaaccaacagtctcatcattcattcattaaatccttttttttctttttttgagactgagtttcgctcttgttgcccaggctggagtgcaatggtgccatctcggctcaccacaacctccacctcttgagttcaagcgattctcctgcctcagccttccgagtagctgggattacaggcatgcgccaccatgcccggctaattttgtatttttagtagagctggggtttctccctgttggtcaggctggtctcgaactcccgacctcaggtgatctgcccgccttgacctcccaaagtgctgtgattacaggcttgagccactgctcccagtccattgaatgtgtgtatatatagttgaataaagaagacaccggagtttgttctgtatcttctcctttcaaattctgtgccatttgaattttttcctattccttttatatatttttaattgacaaattgtacatatttatcatgtacatattgttttgaaatatgtatataccgtagaatggctaaatcaagatcattaacatatgtattactttacctattttccttttttcgttgtgtctctgccaggtttcggtatcagaatgactctgacctcatagaatgagttagagagcagttgctcctcctcaattgtgtggaataatttcagtaggattggtgccgccttttctttacacgtctggtaggattcgactgtgaatccgtctagtctaaggttttttgtgctggttggtaggttttgtatgactaactcaattttggaactcatcgttggtttgttcagggtttccatttcttcctggttcaatcttgagaggttttatgtttccaggaatttctctatttcttctagttttctagtttgtgtgcatagaggcatgtggaatagtctcagggtttcttgtatatctgtgggtcagtggtaatgtcacctttgtcatttctgattgtgtttatttggatcttgtctttttttctttattaatctagctagtggtcttcccatgttatttatgctttcaaaaatatcaactttgtatgaattaacagcatttgccgtgacctggatgagaccggagactgttattctaagtgaagtaagtcaggaatggaaaaccaaacatcgtatgttctcactgatatgtgggagctaagctatgaggacgcaaaggcgtaagaacgatacaatggactttggggacttagggggacgagttggcgggggcgagggataaaatacaacaagtagggtgtagtgtatactgctcaggtgatgggtgcaccaaaatcacaaatcaccactaaagagcttatgtaaccacacaccacctgtaccccaataatttatggaataaataataaataaataatttttttaaaaaatcaactttgggtttcattgatcttttgtatggttttttacgtctccatttcattcaggtcagctccgatgttggtttttttttttcttctgctagctttggggttgatttgctcttgtttttctaattcctctaggtgtgatgttaggcggttcatttgagatctttctagcttcttagtgtagccctttagcactagaaacttcctttgagcactgttctagctgtgtcccagagattctgggatgttgtatgtttgttttcattagtttcagataatttttttatttctgccttaatttcagtctttacccaaaagtcatttggaagcaggttgtttaatttccatgatgactctaggccgggcatggtggctcatgcctgtaatcccagccacttgggaggctgaggcaggagaatcgcttgaatccaggaggcagaggtttcagtgagccaagatcacgccactgcactccagcccgggcgacagagtgaggctgcgtctcaaaaaaaaaaaaaaaaaaaaaaaattgccccttcttaagtttgcatttagatctcttctcctttgaccacttttaatttatcttcacttctgatatgacatttaatttttcattcattttctgtctattattgttccttttttaacttaaaaaaaaattatgtactttatgaatttctgtttcaaggtgtttttcccatctccaaatgcttatttgaaaatgtttcctttcctcttggttcatttcttctggtgtgtgtgtgcgcgcgcccgcgtgcatgtgtgtactcgggtctcattttctgctttcttcctgcagtacctcgtttatgggagatgcacttcgcttttgttatttttttagtagagagggggtttcactggtttagccagaacagtctcgatctcctgacctcgtgatccgcccacctcgggctcccaaagtgctgggattccaggagtgagccaccgcgcccggccgtccactttgcttcttgcagaggctgatggtttgagtaatttccgagattcatagctcgagcgcgccctgttctgtctatgcagtgaagggcagctttttgcatccacggctttttgttggcaaggaggaatgtgcagtggccagatttgtttcttccccttttgttgctgttgttgttgttgctgctgctgttattgttgttgttgttgtattttattttgtagcatcctaaagtgtcccctccttctatttcttatccttatccaggtagggtttagaaaagctaacttcaggggcaggggagagagagaaagagaggaagagaaaatgagaatgaatgacaatacatgaacccatgggtcaacctttatttcaaggcagcccaaaaggacggctctcccttctctttcactctcttctctaggtgtgaagctgatgcagcacaggcgagccccaaaattgaggcttagcccgggggggttcttggcttctcctagaaactaattcaagaagccgggcgcagtggctcacgcctgtaatcccagcactttgggaggctgaggcggatggatcacttgaggtaaggagttcgagaccagcctggccaacatgctgaaaaccccatctctactaaatatacaaaaattacccgggcatggggacgggtgcctgtaatcccagctgttcaggaggctgaggcaggggaatcgcttgaacccgggaggcggaggttgcagtgaacagagatcgtgtcactgcactccagcctgggtgatagagtgcgactccgtctgaaaaaaaaaaaaaagaattcaagggccggccggtggttttagacggcaacctttaccgaagcctcagtgcacagccacagcagagggacacacacctgtatcttttctaagactgggagaattttacaattgcttgaataattgaacagtgcctcgaggatgttacactaggttataaataaattcctgccgtgtttagctgaggcacgaacacaatgcccactgacaattccactttcctcgagggccattctttatgaaaggctgtaggagttccacgacattgttgattcctggattctccaagtctctagaacttgagaactacttttgtgtatttttttaacctttaagtccagagtttctaatgtccgttttatactactataaaatggtactatgtattctttatttatggtactatttacactttattttatacagactctggctccacaaaaaggttaaaaattagccaggtgcagtggtgcacatctgcggccccagctactcaggaggctgaggcagaaggattgcttgagctcggatggtcagggctgcaatgagctatgatcacacatcacatcaatgcactccagcctgggcaacagagtgagaccctgtctctaaaagaatagaagaggctgggcgcggtggctcacgcctgtcatcctaccactttgggagaccaaggcgagtggatcatttgaggccaggtgttcaagaccagcctggtcaacatggcgaaaccccatctcttggcaggcgactgtaatcccagctactcaggaggctgagataggagactcccttgaaccgacgaggcggaggttgcagtgagcgaagatcacaccactgcactccagcctgggcaacagagcaaggctcggtctccccaaaaaaaaaaaaaaaaaaaaaagacacatggaagtaatttaaaaacacttaggaagatgtcatttcttcctatcaaggcgtcctccctttatgttttgtcgttatattgggaacgataaaaaaaatccttttttccgacccatgtggaccaggctggcctcgaactcgtgccctggaacccccgcctccgtgagggcccgagggcaggcgcaaccggcctgagccacaatggctccgggtgtcggggctgtcctttagtccctttgatcttacgcagggtgagggagccaatcaccagaggctcccccctgtcgtcacccagtccccagggccagtgagggccctgcgttccatggcgccccctggagggaggaaggggaactgtatctgagagttcagtatctgacaataaggaaaaggcatagtagatcagatggtgcctagtgttctggggagaagaaacaacggggttggggaatgcggagttgcagtttataatacaggcctcatgtataaggcagacctcatggggaaggtaacatctgtgcagagaaatggagatgagggctaggagccatgcaaatactggaacatgcttgccagcagaagtcgagaaacatggccggcgcagtggcccacacctgtaatcccaggactttgggaggccgaggcaggtagatcacgaggtcagcagttcgagaccagcccggccaacatggtgaaaccctgtctctactaaaaatacaaaaattagctgggtgtggtggcacacgcctgtaatcccagccacttgggagggtgaggtaggagaatcgcttgaacctgggaggtagaggttgcagtgatgcagtgagccgagaccacgccattgtactctcgcctgggcgacagagcgagactccatctcaaaaacaaacaaacaaaaaaaaaaagcaaaaacaaacaggtgagattcattttgataaaatagctgatttaacctaatatacctaaaacatcataattttaacataatcaatagaaacgtttttgcaagattttatgttattttttaccgtacgacgtcttggaaatcttggtttggaccagccatgttcaactgctcagtagccatgtgtggccagaggcggccgtattggacagtgcagatggtgcatgagggtgttcgggcagtgggaacagccagtacagaggccctgtgggggcacatgcctgctgctacgggaacagtgaggagccccgtgtggctgcagtggagtgagagggagaaggtgggagatgtaaccaacagtctcatcattcattcattaaatccttttttttctttttttgagactgagtttcgctcttgttgcccaggctggagtgcaatggtgccatctcggctcaccacaacctccacctcttgagttcaagcgattctcctgcctcagccttccgagtagctgggattacaggcatgcgccaccatgcccggctaattttgtatttttagtagagctggggtttctccctgttggtcaggctggtctcgaactcccgacctcaggtgatctgcccgccttgacctcccaaagtgctgtgattacaggcttgagccactgctcccagtccattgaatgtgtgtatatatagttgaataaagaagacaccggagtttgttctgtatcttctcctttcaaattctgtgccatttgaattttttcctattccttttatatatttttaattgacaaattgtacatatttatcatgtacatattgttttgaaatatgtatataccgtagaatggctaaatcaagatcattaacatatgtattactttacctattttccttttttcgttgtgtctctgccaggtttcggtatcagaatgactctgacctcatagaatgagttagagagcagttgctcctcctcaattgtgtggaataatttcagtaggattggtgccgccttttctttacacatctggtaggattcgactgtgaatccgtctagtctaaggttttttgtgctggttggtaggttttgtatgactaactcaattttggaactcatcgttggtttgttcagggtttccatttcttcctggttcaatcttgagaggttttatgtttccaggaatttctctatttcttctagttttctagtttgtgtgcatagaggcatgtggaatagtctcagggtttcttgtatatctctgggtcagtggaaatgtcacctttgtcatttctgattgtgtttatttggatcttgtctttttttctttattaatctagctagtggtcttcccatgttatttatgctttcaaaaatatcaactttgtatgaattaacagcatttgccgtgacctggatgagaccggagactgttattctaagtgaagtaactcaggaatggaaaaccaaacatcgtatgttctcactgatatgtgggagctaagctatgaggacgcaaaggcgtaagaatgatacaatggactttggggacttagggggacgagttggcgggggcgagggataaaatacaacaagtagggtgtagtgtatactgctcaggtgatgggtgcaccaaaatcacaaatcaccactaaagagcttatgtaaccacacaccacctgtaccccaataatttatggaataaataataaataaataatttttttaaaaaatcaactttgggtttcattgatcttttgtatggttttttacgtctccatttcattcaggtcagctccgatgttggttttttttttttcttctgctagctttggggttgatttgctcttgtttttctaattcctctaggtgtgatgttaggcggttcatttgagatctttctagcttcttagtgtagccctttagcactagaaacttcctttgagcactgttctagctgtgtcccagagattctgggatgttgtatgtttgttttcattagtttcagataatttttttatttctgccttaatttcagtctttacccaaaagtcatttggaagcaggttgtttaatttccatgatgactctaggccgggcatggtggctcatgcctgtaatcccagccacttgggaggctgaggcaggagaatcgcttgaatccaggaggcagaggtttcagtgagccaagatcacgccactgcactccagcccgggcgacagagtgaggctgcgtctcaaaaaaaaaaaaaaaaaaaaaaaaaattgccccttcttaagtttgcatttagatctcttctcctttgaccacttttaatttatcttcacttctgatatgacatttaatttttcattcattttctgtctattattgttccttttttaacttaaaaaaaaattctgtactttatgaatttctgtttcaaggtgtttttcccatctccaaatgcttatttgaaaatgtttcctttcctcttggttcatttcttctggtgtgtgtgtgcgcgcgcccgcgtgcatgtgtgtactcgggtctcattttctgctttcttcctgcagtacctcgtttatgggagatgcacttcgcttttgttatttttttagtagagagggggtttcactggtttagccagaacagtctcgatctcctgacctcgtgatccgcccacctcgggctcccaaagtgctgggattccaggagtgagccaccgcgcccggccgtccactttgcttcttgcagaggctgatggtttgagtaatttccgagattcatagctcgagcgcgccctgttctgtctatgcagtgaagggcagctttttgcatccacggctttttgttggcaaggaggaatgtgcagtggccagatttgtttcttccccttttgttgctgttgttgttgttgtattttattttgtagcatcctaaagtgtcccctccttctatttcttatccttatccaggtagggtttagaaaagctaacttcaggggcaggggagagagagaaagagaggaagagaaaatgagaatgaatgacaatacatgaacccatgggtcaacctttatttcaaggcagcccaaaaggacggctctcccttctctttcactctcttctctgcgtgtgaagctgatgcagcacaggcgagccccaaaattgaggcttagcccgggggggttcttggcttctcctagaaactaattcaagaagccgggcgcagtggctcacgcctgtaatcccagcactttgggaggctgaggcggatggatcacttgaggtaaggagttcgagaccagcctggccaacatggtgaaaccccatctctactaaatatacaaaaattacccgggcatggggacgggtgcctgtaatcccagctgttcaggaggctgaggcaggggaatcgcttgaacccgggaggcggaggttgcagtgaacagagatcgtgtcactgcactccagcctgggtgatagagtgcgactccgtctgaaaaaaaaaaaaaaagaattcaagggccggccggtggttttagacggcaacctttaccgaagcctcagtgcacagccacagcagagggacacacacctgtatcttttctaagactgggagaattttacaattgcttgactaattgaacagtgcctcgaggatgttacactaggttataaataaattcctgccgtgtttagctgaggcacgaacacaatgcccactgacaattccactttcctcgagggccattctttatgaaaggctgtaggagttccacgacattgttgattcctggattctccaagtctctagaacttgagaactacttttgtgtatttttttaacctttaagtccagagtttctaatgtccgttttatactactataaaatggtactatgtattctttatttatggtactatttacactttattttatacagactctggctccacaaaaaggttaaaaattagccaggtgcagtggtgcacatctgcggccccagctactcaggaggctgaggcagaaggattgcttgagctcggatggtcagggctgcaatgagctatgatcacacatcacatcaatgcactccagcctgggcaacagagtgagaccctgtctctaaaagaatagaagaggctgggcgcggtggctcacgcctgtcatcctaccactttgggagaccaaggcgagtggatcatttgaggccaggtgttcaagaccagcctggtcaacatggcgaaaccccatctcttggcaggcgactgtaatcccagctactcaggaggctgagataggagactcccttgaaccgacgaggcggaggttgcagtgagcgaagatcacaccactgcactccagcctgggcaacagagcaaggctcggtctccccaaaaaaaaaaaaaaaaaaaaaagacacatggaagtaatttaaaaacacttaggaagatgtcatttcttcctatcaaggcgtcctccctttatgttttgtcgttatattgggaacgataaaaaaaatccttttttccgacccatgtggaccaggctggcctcgaactcgtgccctggaacccccgcctccgtgagggcccgagggcaggcgcaaccggcctgagccacaatggctccgggtgtcggggctgtcctttagtccctttgatcttacgcagggtgagggagccaatcaccagaggctcccccctgtcgtcacccagtccccagggccagtgagggccctgcgttccatggcgccccctggagggaggaaggggaactgtatctgagagttcagtatctgacaataaggaaaaggcatagtagatcagatggtgcctagtgttctggggagaagaaacaacggggttggggaatgcggagttgcagtttataatacaggcctcatgtataaggcagacctcatggggaaggtaacatctgtgcagagaaatggagatgagggctaggagccatgcaaatactggaacatgcttgccagcagaagtcgagaaacatggccggcgcagtggcccacacctgtaatcccaggactttgggaggccgaggcaggtagatcacgaggtcagcagttcgagaccagcccggccaacatggtgaaaccctgtctctactaaaaatacaaaaattagctgggtgtggtggcacacgcctgtaatcccagccacttgggagggtgaggtaggagaatcgcttgaacctgggaggtagaggttgcagtgatgcagtgagccgagaccacgccattgtactctcgcctgggcgacagagcgagactccatctcaaaaaaaaaaaaaaaaaaaaaaaaaaaaaaaagcaaaaacaaacaggtgagattcattttgataaaatagctgatttaacctaatatacctaaaacatcataattttaacataatcaatagaaacgtttttgcaagattttatgttattttttaccgtacgacgtcttggaaatcttggtttggaccagccatgttcaactgctcagtagccatgtgtggccagaggcggccgtattggacagtgcagatggtgcatgagggtgttcgggcagtgggaacagccagtacagaggccctgtgggggcacatgcctgctgctacgggaacagtgaggagccccgtgtggctgcagtggagtgagagggagaaggtgggagatgtaaccaacagtctcatcattcattcattaaatccttttttttctttttttgagactgagtttcgctcttgttgcccaggctggagtgcaatggtgccatctcggctcaccacaacctccacctcttgagttcaagcgattctcctgcctcagccttccgagtagctgggattacaggcatgcgccaccatgcccggctaattttgtatttttagtagagctggggtttctccctgttggtcaggctggtctcgaactcccgacctcaggtgatctgcccgccttgacctcccaaagtgctgtgattacaggcttgagccactgctcccagtccattgaatgtgtgtatatatagttgaataaagaagacaccggagtttgttctgtatcttctcctttcaaattctgtgccatttgaattttttcctattccttttatatatttttaattgacaaattgtacatatttatcatgtacatattgttttgaaatatgtatataccgtagaatggctaaatcaagatcattaacatatgtattactttacctattttccttttttcgttgtgtctctgccaggtttcggtatcagaatgactctgacctcatagaatgagttagagagcagttgctcctcctcaattgtgtggaataatttcagtaggattggtgccgccttttctttacacatctggtaggattcgactgtgaatccgtctagtctaaggttttttgtgctggttggtaggttttgtatgactaactcaattttggaactcatcgttggtttgttcagggtttccatttcttcctggttcaatcttgagaggttttatgtttccaggaatttctctatttcttctagttttctagtttgtgtgcatagaggcatgtggaatagtctcagggtttcttgtatatctctgggtcagtggaaatgtcacctttgtcatttctgattgtgtttatttggatcttgtctttttttctttattaatctagctagtggtcttcccatgttatttatgctttcaaaaatatcaactttgtatgaattaacagcatttgccgtgacctggatgagaccggagactgttattctaagtgaagtaactcaggaatggaaaaccaaacatcgtatgttctcactgatatgtgggagctaagctatgaggacgcaaaggcgtaagaatgatacaatggactttggggacttagggggacgagttggcgggggcgagggataaaatacaacaagtagggtgtagtgtatactgctcaggtgatgggtgcaccaaaatcacaaatcaccactaaagagcttatgtaaccacacaccacctgtaccccaataatttatggaataaataataaataaataatttttttaaaaaatcaactttgggtttcattgatcttttgtatggttttttacgtctccatttcattcaggtcagctccgatgttggttttttttttttcttctgctagctttggggttgatttgctcttgtttttctaattcctctaggtgtgatgttaggcggttcatttgagatctttctagcttcttagtgtagccctttagcactagaaacttcctttgagcactgttctagctgtgtcccagagattctgggatgttgtatgtttgttttcattagtttcagataatttttttatttctgccttaatttcagtctttacccaaaagtcatttggaagcaggttgtttaatttccatgatgactctaggccgggcatggtggctcatgcctgtaatcccagccacttgggaggctgaggcaggagaatcgcttgaatccaggaggcagaggtttcagtgagccaagatcacgccactgcactccagcccgggcgacagagtgaggctgcgtctcaaaaaaaaaaaaaaaaaaaaaaaaaattgccccttcttaagtttgcatttagatctcttctcctttgaccacttttaatttatcttcacttctgatatgacatttaatttttcattcattttctgtctattattgttccttttttaacttaaaaaaaaattctgtactttatgaatttctgtttcaaggtgtttttcccatctccaaatgcttatttgaaaatgtttcctttcctcttggttcatttcttctggtgtgtgtgtgcgcgcgcccgcgtgcatgtgtgtactcgggtctcattttctgctttcttcctgcagtacctcgtttatgggagatgcacttcgcttttgttatttttttagtagagagggggtttcactggtttagccagaacagtctcgatctcctgacctcgtgatccgcccacctcgggctcccaaagtgctgggattccaggagtgagccaccgcgcccggccgtccactttgcttcttgcagaggctgatggtttgagtaatttccgagattcatagctcgagcgcgccctgttctgtctatgcagtgaagggcagctttttgcatccacggctttttgttggcaaggaggaatgtgcagtggccagatttgtttcttccccttttgttgctgttgttgttgttgtattttattttgtagcatcctaaagtgtcccctccttctatttcttatccttatccaggtagggtttagaaaagctaacttcaggggcaggggagagagagaaagagaggaagagaaaatgagaatgaatgacaatacatgaacccatgggtcaacctttatttcaaggcagcccaaaaggacggctctcccttctctttcactctcttctctgcgtgtgaagctgatgcagcacaggcgagccccaaaattgaggcttagcccgggggggttcttggcttctcctagaaactaattcaagaagccgggcgcagtggctcacgcctgtaatcccagcactttgggaggctgaggcggatggatcacttgaggtaaggagttcgagaccagcctggccaacatggtgaaaccccatctctactaaatatacaaaaattacccgggcatggggacgggtgcctgtaatcccagctattcaggaggctgaggcaggggaaccgcttgaacccgggaggcggaggttgcagtgagcagagatcgtgtcactgcactccagcctgggtgatagagtgaggctgagaatcaaaagaagaaaaaaaaaaaaaaaaaaacaattcaagggcaggccggtggttttagacggcaacttttactgaagcgtcagtgcacagccacagcagagggacacacacctgtatcttttctaagactgggagaattttacaattgcttgaataattgaacagtgcctcgaggatgttacactaggttataaataaattcctgccgtgtttagctgaggcacgaacacaatgcccactgacaattccactttcctcgagggccattctttatgaaaggctgtaggagttccacgacattgttgattcctggattctccaagtctctagaacttgagaactacttttgtgtatttttttaacctttaagtccagagtttctaatgtccgttttatactactataaaatggtactatgtattctttatttatggtactatttacactttattttatacagactctggctccacaaaaaggttaaaaattagccaggtgcagtggtgcacatctgcggccccagctactcaggaggctgaggcagaaggattgcttgagctcggatggtcagggctgcaatgagctatgatcacacatcacatcaatgcactccagcctgggcaacagagtgagaccctgtctctaaaagaatagaagaggctgggcgcggtggctcacgcctgtcatcctaccactttgggagaccaaggcgagtggatcatttgaggccaggtgttcaagaccagcctggtcaacatggcgaaaccccatctcttggcaggcgactgtaatcccagctactcaggaggctgagataggagactcccttgaaccgacgaggcggaggttgcagtgagccaagatcacaccactgcactccagcctgggcaacagagcaagcctcggtctcccaacaaaaaaaaaaaagaaagatacattgaagtaatttaaaaacacttaggaagatgtcatttcttcctatcaaggcgtcctccctttctgttttgttgttatattgggaacgataaaaaaatttttttttcaacccatgtggaccaggttggcctcgaactcgtgccctcgaaccctcgcctaccctgagggtccgagggcccgcgcaaccggccggagccacaatggctccgggtgtcggggctgtcctgtaggccctttgatcttacgcagggtgagggagccaatcaccagaggctcacccctgacgtcacccagtccccagggccagtgagggccctgcgttccatggcgccccctggagggaggaaggggaactgtagctgagagttcagtatctgacaataaggaaaaggcatagtagatcagatggtgcctagtgttctggagagaagaaacaacggggttggcgaattggcagttgcactttataatacaggcctcatgtataaggcagacctcatggggaaggtaacatctgtgcagagaaatggagatgagggctaggagccatgcaaatactggaacatgcttgccagcagaagtcgagaaacatggccggcacagtggcccacacctgtaatcccaggactttgggaggccgaggcaggtagatcacgaggtcagcagttcgagaccagcctggccaacatggtgaaacactgtctctacaaaaatacaaaaattagctgggtgtggtggcacacgcctataatcccagtcacttgggagggtgaggtaggagaatcgcttgaacctgggaggtagaggttgcagtgatgcagtgagctgagaccacgccattgtactctagcctgggcgacagagcgagactccatctcaaaaaaaaaaaaaaaaaaaaaaaagcaaaaacaaacaggtgacattcattttgataaaatagctgatttaacctaatatacctaaaacatcataattttaacataatcaatagaaacatttttgcaagattttatgttatttttttaccatacgacgtcttggaaatcttggtttggaccagccatgttcaactgctcagtagccatgtgtggccagaggcggccgtattggacagtgcagatggtgcatgagggtgttcgggcagtgggaacagccagtacagaggccctgtgggggcacatgcctgctgctacgggaacagtgaggagccccgtgtggctgcagtggagtgagagggagaaggtgggagatgtcaccaacggtctcatcattcattcattaaatccttttttttttttttttttttttttgagactgagtttcgttcttgtttcccaggctggagtgcaatggtgccatctcggctcaccacaacctccacctcttgagttcaagcgattctcctgcctcaccctcccgagtagctgggattacaggcatgcgtcaccatgcccggctaattttgtatttttagtagagctggggtttctctctgttggtcaggctggtctcgaactcccgacctcaggtgatctgcccgccttgacctcccaaagtgctgtgattacaggcttgagccactgctcctggtccattgaatgtgtgtatatatagttgaataaagaagagactggagtttgttctgtatcttctcctttcaaattctgcgccagttgaattttttcctcttccttttatatatttttaattgacaaattgtacatatttatcatgtacatattgttttgaaatatgtatataccgtagaatggctaaatcaagatcattaacatatgtattactttacctattttccttttttcgttgtgtctctgccaggtttcggtatcagaatgactctgacttcatagaatgagttagagagcagttgctcctcctcaattgtgtggaataatttcagtaggattggtgccggcttttctttacacatctggtagaattcgactgtgaatccgtctagtctaaggttttttgtgctggttggtaggtcttgtatgactaactcaattttggaactcatcgttggtttgttcagggtttccatttcttcctggttcaatcttgagaggttttatgtttccaggaatttatctatttcttctagttttctagtttgtgtgcatagaggcatgtggaatagtctcagggtttcttgtatgtctgtgggtcagtggtaatgtcacctctgtcatttctgattgtgtttatttggatcttgtcttttttcctttattaatctagctagtggtctttccatgttatttgtgctttcgaaaatatcaactttgtatgaattaacagcatttgccgtgacctggatgagaccggagactattattctaagtgaagtaactcaggaatggaaagccaaacatcgtatgttctcactgatatgtgggagctaagctatgaggacgcaaaggcgtaacaatgatacaatggactttggggacgtagggggacgagttggcgggggcgagggataacagacaacaaatagggtgtagtgtatactgctcaggtgatgggtgcaccaaaatcacaaatcaccactaaagagcttatgttaccaaataccacctgtaccccataatttatggaagaaataataaataaataatttttttaaaaaatcaactttgggtttcattgatcttttctatgattttttacatctcaatttcattcagctcagctctgattttggtgtttttttttcttctgctagctttggggttgatttgctcttgtttttctaattcctctaggtgtgatgttaggctgttcatttgagatctttctagcttcttgatgtagccacttagcactataaacttcctttgagcactgttctagctgtgtcccagagattctgggatgttgtatgtttgttttcattagtttcaaataatttttttatttctgccttaatttcagtctttacccaaaagtcatttggaagcaggttgtttaatttccatgttgactctaggccgggcatggtggctcatgcctgtaatcccagccacttgggaggctgaggcaggagaatcgcttgactccaggaggcagaggtgtcagtgagccaagatcacgccactgcactccagcccgggcaacagagtgaggctgcgagcccgggcggcagagtgaggctgcgtctcaaaaaaaaaaaaaaaaaaaaaaaattgccccttcttaagtttgcatttagatctcttctcctttgatcacttttaatttatcttcacttctgatatgacattttattttttattcattttctgcctgtttattattgttcctcttttaacttaaaaaaaaaaacatgtctgtactttatgaatttctgtttcaaggtgtttttcccatctccaaatgcttacttgaaaatatttcctttcctcttggttcatttcttctggtgtgtgtgtgcgcacgcccgcgtgcatgtgtgtactcgggtctcattttctgctttcttcctgcagtacctcgtttatgggagatccacttcgcttttgttatttttttagtagagagggggtttcactggtttagccagaacagtctcgatctcctgacctcgtgatccgcccacctcgggctcccaaagtgctgggattccaggagtgagccaccgcgcccggccgtccactttgcttcttgcagaggctgatggtttgagtaatttccgagattcatagctcgagcgcgccctgttctgtctatgcagtgaagggcagctttttgcatccacggctttttgttggcaaggaggaatgtgcagtggccagatttgtttcttccccttttgttgctgttgttgttgttgtattttattttgtagcatcctaaagtgtcccctccttctatttcttatccttatccaggtagggtttagaaaagctaacttcaggggcaggggagagagagaaagagaggaagagaaaatgagaatgaatgacaatacatgaacccatgggtcaacctttatttcaaggcagcccaaaaggacggctctcccttctctttcactctcttctctgcgtgtgaagctgatgcagcacaggcgagccccaaaattgaggcttagcccgggggggttcttggcttctcctagaaactaattcaagaagccgggcgcagtggctcacgcctgtaatcccagcactttgggaggctgaggcggatggatcacttgaggtaaggagttcgagaccagcctggccaacatggtgaaaccccatctctactaaatatacaaaaattacccgggcatggggacgggtgcctgtaatcccagctattcaggaggctgaggcaggggaaccgcttgaacccgggaggcggaggttgcagtgagcagagatcgtgtcactgcactccagcctgggtgatagagtgaggctgagaatcaaaagaagaaaaaaaaaaaaaaaaaacaattcaagggcaggccggtggttttagacggcaacttttactgaagcgtcagtgcacagccacagcagagggacacacacctgtatcttttctaagactgggagaattttacaattgcttgaataattgaacagtgcctcgaggatgttacactaggttataaataaattcctgccgtgtttagctgaggcacgaacacaatgcccactgacaattccactttcctcgagggccattctttatgaaaggctgtaggagttccacgacattgttgattcctggattctccaagtctctagaacttgagaactacttttgtgtatttttttaacctttaagtccagagtttctaatgtccgttttatactactataaaatggtactatgtattctttatttatggtactatttacactttattttatacagactctggctccacaaaaaggttaaaaattagccaggtgcagtggtgcacatctgcggccccagctactcaggaggctgaggcagaaggattgcttgagctcggatggtcagggctgcaatgagctatgatcacacatcacatcaatgcactccagcctgggcaacagagtgagaccctgtctctaaaagaatagaagaggctgggcgcggtggctcacgcctgtcatcctaccactttgggagaccaaggcgagtggatcatttgaggccaggtgttcaagaccagcctggtcaacatggcgaaaccccatctcttggcaggcgactgtaatcccagctactcaggaggctgagataggagactcccttgaaccgacgaggcagaggttgcagtgagccaagatcacaccactgcactccagcctgggcaacagagcaagcctcggtctcccaaaaaaaaaaaaaaaagaaagatacattgaagtaatttaaaaacacttaggaagatgtcatttcttcctatcaaggcgtcctccctttctgttttgttgttatattgggaacgataaaaaaatttttttttcaacccatgtggaccaggttggcctcgaactcgtgccctcgaaccctcgcctaccctgagggtccgagggcccgcgcaaccggccggagccacaatggctccgggtgtcggggctgtcctgtaggccctttgatcttacgcagggtgagggagccaatcaccagaggctcccccctgtcgtcacccagtccccagggccagtgagggccctgcgttccatggcgccccctggagggaggaaggggaactgtagctgagagttcagtatctgacaataaggaaaaggcatagtagatcagatggtgcctagtgttctggagagaagaaacaacggggttggcgaattggcagttgcactttataatacaggcctcatgtataaggcagacctcatggggaaggtaacatctgtgcagagaaatggagatgagggctaggagccatgcaaatactggaacatgcttgccagcagaagtcgagaaacatggccggcacagtggcccacacctgtaatcccagcactttgggaggccgaggcaggcagatcacgaggtcagcagttcgagaccagcctggccaacatggtgaaaccctgtctctactaaaaatacaaaaattagctgggtgtggtggcacactcctgtaatcccagccacttgggagggtgaggtaggagaatggcttgaacctgggaggtagaggttgcagtgatgcagtgagctgagaccacaccattgtactctagcctgggcgacagagcgagactccatctcaaaaaaaaaaaaaaaaaaaagcaaaaacaaacaggtgagattcattttgataaaatagctgatttaacctaatatacctaaaacatcataattttaacataatataaacatttttgcaagattttatgttattttttaccatacgacgtcttggaaatcaagaaacagagcaagcctcggtctcccaaaaaaaaaaaaaagatacattgaagtaatttaaaaacacataggaagatgtcatttcttcctatcaaggcgtcctccctttatgttttgttgttatattgggaacgataaaaaaatttttttttcaacccatgtggaccaggttggccttgaactcgtaccctcgaacccctgcctccctgagggcccgagggcaggcgcatccagccggagccacagtggctccgggtgtcggggctgtcctttcttccctttctccctctcgtctcctgtctcccgtctccctctccccacggtctccctctccctctccctctcctgtctcccgtctcccgtctccctctccacatggtctccctctccctctctttccacggtctccgtctgatgcccagccgaagctgcactgtactgctgccatctcactgcatcctccctgcctgattctcgtgcctcagcctgccgagtgcctgccattgcaggcacacgccgccacacctgactggttttcgtatttttttggtggagacggggtttcgctgtgttggccgggctggtctccagctcctaactgcgagtgatccgccagcctcggcctccccaggtgcggggattgcagatggagtctcgttcactcagtgctcaatggtgcccaggctggagtgcagtggcgtgatctcggctcgctacaacctccacctcccagccgcctgccttggcctcccaaagtgccgagattgcagcctctgcccggccgccaccccgtctgggaagtgaggagcgtctctgcctggccgcccatcgtctgggatgtgaggaatccctctgcctggctgcccagtctggaaagtgaggagcgtctctgcccggccgccatcccatctaggaagtgaggagcgcctctgcccggccgcgaccctgtctgggaggtgaggagcgtctctgcccagccgccccgtctgagaagtgaggagcccctctgcccggcagccgccccgtctgagaagtgaggagcccctccgcccggcagccaccccatctgggaagtgaggagcgtctccgcccggcagccaccccgtccgggagggaggtggggggggggtggtcagccccccgcccggccagccgccccgtccgggagggaggtgggggggtcagccccctgcccgtccagccgccccgtccgggaggtgaggggcgcctctgcctggccgcccctactgggaagtgaggggcccctctgcccggccaccaccccgtctgggaggtgtacccaacagctcattgagaacgggccatgatgacaatggcggttttgtggaatagaaaggggggaaaggtggggaaaagattaagaaatcgcatggttgccgtgtctgtgtagaaagaagtagacatgggagacttttcattttgttctgtactaagaaaaattcttctgccttgggatcctgttgatctgtgaccttacccccaaccgtgtgctctctcaaacatgtgctgtgtccactcagggttaaatggattaagggcggagcaagatgtgctttgttaaacagatgcttgaaggcagcatgctccttaagagtcatcaccactccctaatcgcaagttcccagggacacaaacactgcggaaggccacagggtcctctgcctaggaaaaccagagacctttgttcacttgtttatctgctgaccttccctccactattgtcctatgaccctgccaaatccccctctgcgagaaacacccaagaatgattaaaaaaaaaaaagaaagtgttaatgacagatttgcctccattaaaagccaagaaagtcaaattattcaaattctgtctagggtatatatgaaagatttaaatgtaaaataatgttgtgaatttcaacacatttacttcatttttcagtatttttcaactagtttagcattccaggaaaaataaatttagaaaaaatatataaaaacttgcgcagggcacagtggctcatgcctgtaatcccagcacaggcctttgggaggccaaggtgggtggatcacttgagcctgggagtttaagactagcctgagcaacatggggagagcctgtctctacaaaaataatttaggaattagctaggcatggtagtgtgtgcttgtagtcccagctactcaggaggctgaggcaggaggatcccttgagcccaggagtttgttactgcagtgagctatgatctcaccaccacactccagcctgggcaatggagcaagaacccctctccttaaaaaaaaaaaaagcaagtatatgggggcacatacatttcctttgaaatagcagtctgatgtggcatgagactggcctttttaaaaaatttgatattttgttcatcattgattttttttgcattgattttgatttttaaaaaatgttgcattattattgttattgttattattgtcactctgtcacccaggctggagtgcagagtctccctgagttcaagtgattctcctgcttcagcctcccaagtagctggaactacaggcgtgtgccacctcaccctaattttattttttatttttattttttttgtagagacagggtttcgccatgttggccaggctggtctcaaacttccgacctcaagtgatccacccaccttgggctcccaaagtgctgggattacaggcgtgaaccaccgcgcctggccaatattgcattaaatattcttttatcttgattgctgcatttggggcacacatttacatttggtactgggtgaatacagctccctctggccaggctccagccagccccactcctccagggtgaagtccaccgccacatccttgaaggtcactgattcctgcaagggccagtttcattctgtggagtggcacgtccttctggaacttgggggcagaagtgtcaggggtcaagagcccacaacagccccctgggctggaacattctgattgtgcagaattgggatgcctgaatccaactggcctatgggaacctatctaaggcagaaactcgcccataggcaccttggtagaaagtagaacaaggagccctttcacatgactctttactgccatctgttgggaagtcattgtaatataccaattaatttagtatatgacagtttatcaaactgcctgcaaactgccaccaatgtatgaggtataaggtgggagtcctgcctgggatgaggcacacttgtgcagtgcataacctgcacagctctaagtgacagccctaaaaaatgctttttttttgagatggagtctcgctctatcccccaggctggagtgcagtggcgcaatctcggctcactgcaagctccacctcccgggttcacgccattctcctgcctcagcctcccgagtagctgggaccacaggcgcccgccaccacgcccggctaattttttgtatttttagtagagacggggtttcaacgtattagccaggatggtctcgatctgacctcgtgatccgcctgcctcagcctcccaaagtgctgggattacaggcatgagccaccgcgctcagcctaagaaacacttaaagaaaaatccgtcaagccgttttgtgcaggagatattcgcaagtcccattctatcccagaccccatccctgatcctcacccccattcctgactccagagatgaggctcagggatgaagcaaaaccatccattgcccactttgcctggtaactgaaaggctgcagtgttcgatgaaaaatgtttagactgcgcgacatggtcccagctcagagcattctgcctctgcctcctgcccctgggcactgcccggctcccctctcctcataccccctttcccagtattggaagagtcaggagaccttgagatcatgcacagggatgaagagggcccactggagtccacaaagttatcctggggaagaggaagcccagactcacctggccctcggccatcaaggtcccattggccattgctgggttctgggcatgtgcctctgggagaagggttcacgccagggcccgaagagctggaggaggagaccacagcagaaaaagggtcatttgtgaccctgacagacagatgctttccccaagactcctggtcacggaaggggccatggtcccctaagagtcaaagcaaagtcccaggacaggccacctgaggcccccattccataccagtgacaacagccagcaaccatgaggctgtctcacctccccgacacaacagctctcggacgtgggaacgatggttacccctagatgaggacattgaggcacaagaggtcaagacttgctcaagttcatggagacaaaaagtttcagagaagtctagccacagggccacccctatcttttatatatatatatatatatattgttttttttttttttagatggattctcactcagtgtcccaggctggctggagtgcagtggcgccatctcggctcactgcaacctccgcctcccaggatcaagcaattctcttgcctcagcttcctgaatagctgggattacaagcacctgccaccatgcctggctaatatttacatttttagtagagatggggtttcaccatgttggcaaggctggtctcgaactcctgacctcaggtgatctacccacctcgggctccaaaattgctgggattttaggcctgagccactgtgcctgggccaggggttcttatttatttatataatttattattttttaataatacagacagggtctctctatgttgcccaggctggtcgcgtactcctgggctcaagcaatcctcccacctcggcctcccaaagtgctgggattacaggcatgagccaccacacccagccttggcaaagattcttaaaactttattccataaactgggacttcctgcctggtggggtagacaggctgtataacagcccccagagatatccctggaacctacagatcttatcttatatggaaaagagactttgcggaagggattaagtgaaggatctttagatggggggaattatcctggattatctgggcgggcactaaatgccttcacaagtgtccttataagagggggcagaggagagtctgacacagggcagaagaaggccatgcaccagaagcagagagcagcagaggctgagagagaggacgctacactgctggctttgatgacagaggaaagggctacaagccaaggaaagcaggcccctggaaactggcaacgaggcagcgaaacagatccatccctggagcctctggagggagcatggccgtgctgaccccttgatccctttgaatcccgcttccaacttctggcctccaggattgtaatataataaaattgtgtcattttaagtgtgtggcaatttgttacagcaccatgggaaactaatacagtccacagaatgaaaagatgcagcacctcacacacatttcccaggcgagaagccatacacatccccggctacacagaacacacacacctgaatgctgaaactagtgcatgaggtgttttttttttttgagacagagtctctatctgttgcccaggctggagtgcaatggcgtgatctcggcttactgcaagctccacctcccaggttcacaccattctcctgcctcagcctcctgagtagctgggactacaggaacctgccatcactcctggctaattttttttttttttaggagagacagggtttcaccatgttagccaggatggtctcaatctcctgacctcatgattcacctgcttcagcctcccaaattgctgggattacaggtgtgagccaccacacctggcctagtgcacgaggttttgatgagaaaatgaggaagagagtcttaactttatccccatgaatcacttgttaattacaaaaagaacagggtaacttttttatcttatttaaataattaatttattaatttggagacagggtttcgctcttgttgcccaggctggagtgcagtgactcaatctcagctcactgcaacctccacttcctgggttcacacaattctcctgcctcagcctcccgaatagctgggattacaggtatccaccatgacacctggctaattttttgtatttttagtagagatggggtttcaccatgttggccagactggtctcgaactcctgacctcaggtgatccacccgcctcagcctcccaaagtgctgggattacaggcgtgagccaccacacctggccttattttatttttgagacagagtcttgctctgtcacccaggctggagtgcagtgaggcgatcttggttcactgaaacttccacctcccgggtttcaagtgattctcaggcctcagcttcctgagtagctggggttacaggagcccgccaccacgcccagctgatttttgtattattattattattattattatttgagatggagtctcgctctgccacctaggctggagtgcagtggcgtgatctcggctcactgcaacctccacctcccagcttcaagcgattctcctgcctcagcctcccaagtagctgggattacaggtgtgtgccaccacaccaggctaatttttttgtatttttagtagagatggggtttcaccatgttggccaggctggtctcgaactcctgacctggggttatccgcccccctcggcctcccaaagtgctgggattacaggtgtgagccaccgcgcccagaccagggaaactagagaggagaaacttggcagatgccaccttacccatgtgagtgaggctgatgtggtgtgtggtgggacaagccgagcccagggtccccagtctgatgaggagacagcatcactcctagggcatccctgccaaaagcgtgtgacctaaatctaactatgaagaagcaccagacaaacccaaactgagggacatgcaagtacatggtctgtaatcttcggaacttccaaaagaagactgaaaaccggttccagactgaaggagacccaacaaagcgagcaatgtgtgacctaggatttcctttggccattaaggacattattggagccagctgtaatcccagcactttgggaggctgaggtgggaggatcgcttgagcccaagagtttgagaccagcccgggcaacacagtgagaccccgtttctacaaaaaaaaattaaaaaaattagccgggcatggtggtgtgtgcttgtaatcccgactactcagaagactgaagtgggaggatctcttgagcccaggaggtcgaggctgcatgagctatgattgtgccactgcactccagcctgggtgacagagcaagactctgtctccaaaaaaagaaaaagaaaaagaaagacaaaaagacattattggaagaatcatcaaaaatttgaataaagtctatagattagctattagtattacatcaatattaatttcctcattgtgatcgtggtgctatggttatgtaagaaaatgaccttgtctttggaaaacacagagattcgctagaaggactggggagtgggagggcgcagagaccgagagagggcgacagagacccacagagagggggagagagacgcagagagagggggtacagagacccagcgagagggggacaggacctggggcggcgagggtgaggggaagatcagagagagctgggagacccagagagggaagaacagatgctcaggataaggggagccgagaccgagtctgtgcctgtgcagtgctgctttcgggttctggggtcagaatctgggttgcagctctgccagcctgagagaaatcgcggagtctccccgactctcagtttcttcaactgcaaagtgaggaaaggtaggttccccttcctagggatcgcagcagtcccacgctccgccggactcctggcaaacagcagacgcccaattcctgcgcgccgagtcgtctgagccgcactgatactaggtgggactcagggaatgacaagagggggcggggcgtcacccacagcgccctccccactcccaaccagacccaacttgggcccgcccccggagcttctgctagcctgtctggcccggcctgcacccacctgctccggtcgggtccgcgagttccgtgcgtccaggcggattccgctggacagccaggccttcccttcctccgccgggtcccggaacgcgcctgagcagtccctgtctcggaactgtaagtcccggtaccttaaacgcggcatcgcagctggactacatttcccagaaaccattgaggctcttgctcctcccggcctaagggctctgactgcgagggaatgctgggaaatggagtctgggagcaggatacggggcaggagtaagactgtatttagatacatacacaacagcttttggaggaaaactggtatttgggacatgcctgactgtactggcacgcgaatatccctgttttaggcagaggcgatgccattgtccatttaatccaaatttctcataccatggctgaagtcttcaggacagataaaatttggccctgtgtaaactgatggtgaatgaattgaaccactgttactcaatttccctaggcatctgccttcctatttgcctcagtttcacccaccacttcttaaagggcagtgtgatacaggcaatggagcctgttctgggagctgggagatgtgtgttcaggagtgtaaggatggtttgatattaggacattatgcaatttatcttttgacctttctgaatatatcaatatgcaagcatatctatagatacactaaaaagacttttaataacatccagtaaccctagatgctgagaaagcttacaaaaaaattctgtaaccagtcatttctagataagcttaataaattaagcatatattcatattgaacaacaatagcgacaatgttaaagaattactggcttcttattgtgtttatgtatgtccatataatcaaaacctcatatcaagcttaatcgtaaaacactaaaagaattgccaggctgggtgcagtggttcacacctgaaatcccagcactttgggatttcaaagagggaagctaaagagggaggatcacttgcactcagaagtttgagaccagcctgggcaacatagctagacccccatctctacagaaaatataaaagttagccaagcatagtggtgagcacctgtagacccagctactcggcaggctaaggcaggaggatcagttgagcccaggagggcaaggctgcagtgagctgtgatggtgccagcctgggcaagagagcaagactctgtctcaaaaaaaaaaaaaagtgtaaaccgtatatgtcctcatgagaaaaagctagatggctcattgccagaatgaaataataataggtgttacttattgacaacacgttgtgagctttactagttgactgagctgacaccaccaccctatgaagaaggcattgctctccctattttacagacaaggacactgagatagaggatttatgtcatccccccaagctcccagagctagtcgaggacagaggcaggacttgaatccaggttcagcccatatttgcaaccacttaattttactgctgccaagtttgctcctttttccttgtgttccgataaccaaatgctccaagcacaggttgtactgtcagctgaggctctagagtcagggtggcatggagcagaacctcagctaatctataataggcatgtcacactggagacaaaggtgactccatcttggatggttatccgccatgttgacttctgattaatcccagtcctgggaattccttctgatttctactttacttactgtccctagtgtaagaacatgtcaaccttgatgttatcacacaaattataggctacgacacagcatacagaacattgcctgttctgtaggcttaattgtcttaacccttaattgtcttgctaaagcaagtattgcccttccctatgtgagataagccttaggattagggagtaactgtgtggagatagacctgtcttgctgccacccaagaccatgcttccctttgtaagttccccaaataaatcaccccttaccaatgaactgggtttgtctccctcttttttggtttattgtctccttccacacttgggggttattttgcataaagtccttatatggaacacacgtgaacaaggagtaagtcttcattgctacaagccatgaaggaggttgggggggtgtttgttactgaagcataactacttatcctggctgatacaactgtcttcaaaggttttgaggaagctgaaatttgatattaaatacaagttattatcagagctttgcaagtcattaacctctctgtgcctcagtttcctcattgtacatggggcgataataagtacatggggcaataataagtaccctttttatcaggttatgagatttgaataggtagatagaagtaaagccattagaacagtatgtgacagatagaaaacaccatataagtgtttgctattattaaaaaacgcgttaggccaggcgcggtggctcatgcctataatcccagcactttgggaggccaaggcaggtggatcacttgaggtcaggagttcaaaaccagcctggccaatatggtgaaaccctgtgtctactaaaaatacaaaaaaattagccggacgtggtggctggggcttgtaatctcagctactcgggaggctgaggcaggagaatcacttgacccgggaggcagaggttgtggtgagccaagatagcaccactgcactccagcctgtgagactctgtctcaaaaaataaaaaacgtgttaatagttcccgccggtgacttatattttttccttatttatttattttttgagacggagtctcactctgttgccaggctggagtgcagtggcatgatctcgactcactgcaacctctgcctcccgggttcaagcgattttcctgcctcagcctcccaagtagctgagactacaggcgcccgccaccacacccagctaatttttgtatttttagtagagacggggtttcactgtgttggccaggatggtctcgatctcttgacctcgtgatccgcccgcctcggcctcccaaagtgctgggattacaggcgtgagccactgcacctggccccaactgtgacttgctatttgctcttccttctaccttttccccactactgctttcagaaaacacctacttttcttgcaagaacaagttcttacagcctctcctgcagtaaacgttctccgatttccaccgagctgagccggagctggcaattcgctctgtggggttcccacaggaacatcccagtatcttatagggttatgtgctaaccgctgtgttgtaattctttgtaactgtctgtctctctcgctccagtctcatcacactataatttatgtacgacttaattatctgtttattctgcacttctcccaggaaatttccatgaagttgaggaagtgtctggacctgcagcattaagacgttaaaacaaacaaaccctggccaggcgcggtggctcacgcctgtaatcccagcactttgcgaggctgaggctggcggatcacttgaggtcaggagttcgaaaccagcctggccaacatagtgaaaccccgtctctactaaaaattcaaaaattaagccgggcgcggtggcttacgcccgtaatcccagcactttgggaggccgaggcagacgcatcacaaggtcaggagatcaagaccatcctggctaatacagtgaaaacccgtctctactaaaagtacaaaaaattagctgggcgcggtggtgggcacctgtagtcccagctactcgggaggctgaggcaggagaatggcgtgaacctgggaggcggagcttgcagtgagaccagatagcgtcactgcaagtccggcctgggcaaaagagcaagactccgtctcaaaaaaaaaaaaaaaaaaaaaaaaaattagctgggcatggtggcgcacacctgtaatcccagctacttaggaggctgaggcaggagaatcgcttgaaaccgggaggcagcagtgagctgagatcatggcactgcactccaacctgggtggcagagcaggactctgtctcaaaaaaaaaaaaaaaaaagaaaagaaaaagaaagaaaatgtattcgaatctagtattcaggtgcacagagggtgaagaattgtagttcagatagagaagaaaacctgtaccttccacattgaccactgctcttcctctatttaaccatcctcgagggttgcactgagtcatgtcctttcggatgcatttccttcccagaggataagtggttgtcacttcaaacccttacaatatgctgtccatcctttttgaaggtccaagtcacttctaccttgaattaggataatgggtgtctacagatgagtgggatctggtcccagcctttgaggagcacccagtcaggtagagaaacagagttggacaccaactagggggagggtccccaggaaatggacagagacattgatggatttgtcaccaattttattaaatttattttcctttctccttacccccaaaccaccgtcctactgcagcaggagttttcggttttgtctgtatgtacaagccctggtcagagagaaaaagcctgtagattagaatgagaatttcaagcttttccagatcaagagacccataacttccctccccataactttcctacaatctttggcctgatttggctcatccagtgacgtcatgggcatctgggcagattttcagggttctctgccaaccggagttggtgaggagagaggagagaagagctgggaccaggggtgatggtcaaatgtgggaacagaaagagtccaaaaagacaagaggagacacaggcagaaatggagagagataaggtagagacagggtatagtggaagcaggtatagtgggttacagcgtgtcccccaccccaaagatatatccaagtcccaactcctaggacctgggaatgtgaccttaattggaaacacggtctttgcagatgtaattaagttaaggtgacatgagatttaggatgggccctacatctaaagacaggtgtccttagaagagaaaggagagggagatttgagatggacacacagaaaacaaaaccatgtgaagacagaggaagggattagaagggagctaaggaatgccagcagccaccagcagctaggacacaggcatggggtggattcactctcagaggctctggaaggaaccaactttgccaacctcttgatttcagacttctgctttcagaacccagagaatacatttcttttgctttaagtcacccaatttgtggtgatgttacagcagcaataggaaatgaatacacagggagacagagaaatgaggagagagagttggaagagaggctgagcaagttcacagtgagaggtagcctgcacggagcactccccatgcgctaagtgttattaacagcgttcactggccaggcgcggtgactcatgactgtaatcccagcactttgggaggatgaggcaggtggatcacctgaagtcaggagtttgagaccagcctggccaacatggcgaaaccccgtctctaatgaaaatataacaattagccaggcttggtggtgggcacctgtagtcccagctactcaggaggctgaggcagaagaatcgcttgaacctgagaggcagcggttgcagtgagccaaggtcgcaagatcgcgccattgcactccagcttgggccacagagcgagactccatctcaagaaaaaaaaaaaaaagagcgttcactgattcagttatcaccacccccgccagtgggaggtgatggcattactccctttttgcatatgaagaaactgaggcgttagggaaaggagattaattgggtacttggaggaggcagagagagagagagagaaattgagacggagaggggaagagaggggccggagaaggggctgggggggagggggagggcacaagcataaagaggcagcgagataagcttagagggggagaggaaggtgagggccacttcctccctaggcacagggcctggggtccatggaaatgttttcactgtagtatctttaaaagccagaagaagataaatgaatataacaacagtaattatgatgatgcatagaacataatgaagccaacttggatgatatttgtctttctaccaatgcatccaccaaatataacttttagcgtttttttttttttttttttttttttttttttttaatgtaagaagaggcccacaaaggcaaaagtgctgaggacccgggaaagttgtaatgtggcccagaggtggagaaaaaggaaaatgaggaagaaagacagaaataagatgagagaaaggtacggggcagggggcgggagggagaagagggaggagagagacagagagaaaaagagagacagagactaaagtgactgaagaggagactcccaaagtacacagtgacccatccaggggagtcgccatttttgaggggcccagtgggttccacgggggactgaggagggggcaaggatgactcacgagaccacgatgaccacgaagacaaagacagccagagacacagaaatgaggatgcccaacagcgcctggttcctcgggtatttgctgtccatctggtactgcagggccacgcggggttgccggtcgactggggcgggtggggaaacagccccgacctccacgtcaccacccctccttagccccatacccaccccacctgttcattcagcagcctggggcaggggtgggggtggggcgctctctcttcttctcttcctgcttgttccctgccctctcctggggtctgagtctccatttatccattcctctagtgctctgtctcaggcgccattgtaggcatttgggatatagccgggaaccaaactggcaaactggactcatggagttgacagtccaccccgcatatcacagttatcacagttacagtgaggagctagttctaaaagcatttcatttgatgggatggggtggggtgaggaggacttgggaagtttgactcaaaaccaaaagatacgatacaatggtcaggcatggtgagcttgcgcctataatcccagtactttgggaagctgaggcagggggatcacttcagcccaggagttcaagtcagcatgggctgtgagatcctatctctacaaaaaagaaaaaattagctaggtatggtggcacgagcctgtagtcctagcaactcaggaggctgaggtgggaggattgcttgagcacaggaggttgaggctgccgtgagccgtgactgtgccactgcaccccagcctgggggacggagcaagaccctgtctcagaaaacaaaacaaaacaaaaaccagagacaccatgcacatgagagggaggtgcaaaatgcgaacagtttcacaagatgaaagtcttagttgctgcatcttagctattggccctgaaggtggccttgggagttgctttctgcgtcttccacttgcctcccaccaccaactctttccttccatcagcaaagcctcttggcttgaccttcaaactgtaggcagaatccaatccacttccatggctaccaagcaggtccaaccccagcccactgcttctcttaggaggctcccttgacccctcctcccacagttcctcacatggcctccgggaggcgctgttaaaacctaagtcggctccctctgctcagtgtcttcctgctactccatggccccccatctcagaataaaagctcaagttctcaccatgctcttgcaagccctgcaccatctggttcccacgtgacccggccattgttctagccaccctactattctctttcattcactcggctctggccacactggccttctcctccttgttgcttaatcatgttggatctttgcatgtgctgttccctctgtcattgacactgttcccatcactcacttacttccttcagctttcaaaagtcacctctttagaggtgccctacatccgtattttctaaagtagcagcctcccccaggcactatctaccaaaccattctattttcattagaacaccattgccatctggatcaagcctgtttatttgttcatgcaattaccatctaacccagtggttctcaatctgggataattttgtcactcaagggacatttggaaatgtctggggacatttctgattgtcataatggggagggagatgctactggcatctggtggatcgaagctagggatgttgctaaacatcctacaatgaccaggacagcctccctaacaaagaatgatccagctccaaatctcaacagtgctgaggttgagaaaccctagtctaacctctggccccattaaaatgtgggctccatgagggcaggaactacatctgtctcccattccactgttcctcagtttgggacatcgtagggtgctcaaaatatttgttgtcaccaaataccagccaaaggaagcaaacaggcaaatccaaaagtgggacactctataggacacactcccttctttttcaatgccaatgtcatggagggaaaaaaaaaaacccaaaaactgataagagaaactgttctaggccgggtgcagtgactcatgcctgtaatcccagcactttgggaggctgaggtgggcgaatcatttgagcccaggagttcgagaccagcctggccaacatggcaagaatcagtctaaaaaaacaaaacaaaacaaaacaaaacaaaaactgttctagattttaaaaagaagagaaaaacctaacaattgaatgatataagaagtcctttcattgaacactggtttgaacaaatcaactgtgaaaaatattctggggacaattaaggaagttgacagtgggacctggaattatttgacattgaggaatcattgctaggtttggagggtgtgggaacgacattgtggctacttaggaaaatgtcattatttttagaggtacatgctatgtatggggcatggtgtctgtggtttcttttaagatactatggcaaagaataaagtaggtgaaataaatatggaagaatgttaattgttaacataatttgatagtaagtgctacttttgagattatgatcagagaggcctgtctgaggaagtgacctttgagacccaaatgaagtgaaggagtgattggaacagtgtgacagagagagggaacagcatgtgaaaagatccagcatgactattcaacccggatagatagatgtggattcattatacttttttttttttttttttgagatggagtctcgcattgtcacccaagctggagtgcaatggtgcgatcttggctcactgcagcctccacctcctatattcaagcgattctcctgccccagcctcctgagtagctgggattacaggtgcctgccaccacgctagggtagttttttgtatttttagtagagacggggtttcactatgttggccaggctggtctcaaactcctgaccttgtgatctgcctgcctcggactcccaaagtgctgggattacaggcgtgagccactgcatgttcggtctcgttgtactattctttctgctatgagaatacgttttttaggctgggcatggtggctcacgcctgtaatcccagcactttgggagccgagtggatcacctgaggtcaagagtttgagaccagcctggccaacatggtcaaaccccatctctactaaaaatacaaaacttatcagggtatggtggtgcacacttgtagtcccagctacttgggaggctgaggcaggagaatcacttgaacctgggaggcagaggttgcagtgagccaagatcctgccattgtactccagcctgggcgagaatccatataaaaaaaaaaaaaaaagaatgtatgttttttagatttatgaatgaatgaatgagtgaattcagcacatccttccaaattccccaggtatagcaatggctaagaataaaatctttttctagcacctgccattctggagctaggggcattctaaagttccagggagtctttccatttaacagatggaggaaagtgaatttcagaatacaggagcaacttctgggccacactctaagcaaatggttagggcaggattcgaggctgcatgtgggagcctcgaaacccatatctagtgggtcatggctgtcttcatctcttgcacgcctgtcccatgtcttcccccacccccagaagcttaccaaagcagtactttttgtggatacacttgggagtgatcctctggcaatgtaaacagtccaacacctcttcttttagcaagcctaggcaaggggaaagggagaagtaagacaagggcagatatcagaggaccggcaagggtggaaaggaagaaggagaaagaggagatggggtcccttggcttctcctaaatttcataggtcccactgcccagcagaggaactaagcaaaatgcactgacaattcacataaaaaataattgttatataatcattgaagaactaaattcatccagtagattcagcattctgcttgtggacatttaattaaacatttgttaattctgagtttgcacttttctttttctaatttggagcctcttttgcagacactggtgagatgtctcctctttgggcacactgcctcctcctctactggtgcatacaggagggctacatttcccagggtgcctttcagtaaactgtgaccatgtgacctagtcctggccaatggaaagtgagcaggatcatgtgtgtcccttccaggcttggctatacaactcagtgtgattgctattgcttttccttttgaagcatgcttagaagctgccatgtgtgtatagcctggatccctgagtcaccacctggactgccactcaactgtcaatgaaatttgggtgaaagaaaaataaacctttgttgtgttaaaccaccaagatgtgagggtttatttgttaatacaacatagcctattttattgtgacttacgtaccttcaaaatgttgttttgcagatagtcattattttcataaacctttaaaaagcaaatctccctaggtaccatggctttggggtaagggaactgccaaatggagtaaggagtggtagccaggcttgatttggggagacagggtgaagggggttaggagggtagagaagggagagatagacgatccagaactcacggcaaagtttggggttgcaggctgcaagagaaaattgctgaggtgagttaaattgggatggcaacttgataatttaattggaaagggatcaggagagcaggtaaggggtgaggctgggaaaggagagaagggaagattggggagagatgaagaaggctgagctataggggaggtgaagaaggagtttgggagaaaaagtggtaaaaggggatcaagaggtcaagggagaagaggagaggggattggtggagagatatgctgcaccttttaattcatatgaaattaaaactttcttgaattccttgatcacattcgccctgagggtcaccagctcttccagcagaggctcatctgaggagagaaagagatctctgtggggtgggaggcacccagaaagcccaccccactacctgaagcttccaggagaagagatgaggaagctcctcttcatttataaagggtaaccaagaccaggattactaagggtcccccaggcaaatctatggccagggagatcctgcatctatattctgattcaccgtggggcctaggcaaagccacccttccttggcctcactttcctcatctggcaagtggatttgatctctcttctcctcttcttttttttttctttttgagacggagtctcactctgttgcccaggctggagtgcagtggtgtgatctcggctcactgcaacctcggcctcccaagttcaagcgattctcctgcctcagcctcccaaatagctgggattacgggcacgtgccatcacacctggctaattttttgtatttttagtagagacagggtttcgccatgttggccaggctggtttcaaactcctgacctcaggtgatcctcccacctcggcctcccaaagtgctgggattacagacgtgagccaccgcacccgacctcttcttttttgtgtctacactcactccttcatgatttcaatccatatggctttatatattacctagacgtgcactgtccagtgtggtagccactagccacacatggctactgaacacttgaaataggctagtctgaattgagatgtgctgtaggtataaaatgtacactggattttaaagacattgtgcaaaaaacctgtaaaatatattgataattcctatgtggattgcatgctgaaatggtgatattttatatattgggttaactaaaatatattattaaaattaatttcacctgtttctatttacctttttaaaaatgtgactactagaattttttttttttttttcaaacggagttttgctcttgtcgcccaggctggagtgcaatggcgtgatctttgctcactgcaacctctgcctcctaggttcaagtgattctcctgcctcagcctgagtagctgggattacaggtgcccgccaccacacctggctaatttttgtatttttagtagagacggggttttaccatgttggccaggctagtcttgaattcctgacctcaggcgatccacctgtctcggcatcccaaagtgctgggattacaggcatgagccaccgtgcccggctgctactagaaaatttaaaattgcatatgtgactcctatttgtggctgacattctatttctattggatggtgctgttctatacacagatgccccccacgtttatattactagcccagagggctcactgaaggtgggatttatatacccaactatctggtcaagatatccaattggatgtctaagaggcatctcaaacccactaagtccaaaactgaaccctcgttattctcctccagacctactcccaacctcccagtctactccatcttagtaaatagatgtgtcatgattctaattgctcaattcaaaatccttggtgctttgacgcctttttcttttcctttttctttttttttttttttgagacgtagttttgctcttgttgcccaggctggagtgcaatggcgcaatctcagctcaccgcaacctccgcctcctgggttcaagcaattctcctgcctcagcctcctgagtagctgggattacaggagtgccaccatagctggctaattttgtatttttagtagagacagggtttctccatgttggtcaggctggtcttgaactcccaacctcaggtgacccaccgtcctcagcctcccaaagtgctgggattacaggcgtgagccactgtgcccggctgacgcctttcttttttttatatccctgtgcaattcgtcagcatgactggcaacaaatcctgtttgttcaatattcaaaatacccattccctccccttaactctaagatctcatcttccatagagacaatgtcgccgtctcactccactctggccttcttggatgttctgtgactatgccaaacatagtcccatctcagggattccaccagctgttctttctgcctgcacccttctacccctagaccccctcatggctgcttccctctccccttcaggtcttttctcacatgctcctttttaagggacatcttttttggatgccctactttaagctgcaatccccacccctactcacagcacttgctattccgtggtccctgctttatttttttcctccttagcatctccctccatttgacatattttatcgggcaataaaggattaactgagcaggcctgggttgtcccaatcctgcacatcccccgctcccccccaaaaaaatttggctcttgcctggctcacagaaggtaacctctatttccttggaatatcctgcctgttaagagtatcttggtttggccaggcatggtggcttacgcctataatcccagcactttgggaggcctaggcgggcagatcacttgaggtcagaagtttgagaacagcctggccaacatggtgaaacctcgtctctactaaaaatacaaaaattagccgggcatggtggtgggtgcctgtaatcccagctactcgggaggctgaggcaggaaaatcgcttgaacccggcaggcggaagctccagtgagcagagattgtggcactgcactcgagcctgggtgacagggcgagaccgtctcaaaaaataaaaataaataaataaataaaagagtatcttggtttatgaccaggtgcagtggctcacacctgtaatcccagcactttgggaggctgagacacaaggatttattgaggccagaagtttgagaccagcctgggcaatataatgagacccagtctctacaaaaaattaaaaagtagaaaattagccaggtgtggtggcacatgcctgtggtcccagctacttgggaggctgaggcggcaggatcgctggagccctggaggtcgaggctgcagtgagctgtgatggcgctactgcactccagccggagcgacagtgaggctctgtctcttaaaaaagaaaaaaaaaaggctacattgcatgcgtgtttgctcttatttttatattcaagggaggtggggcagaccggcggaaagaagaggggtgctggagaaggcgttccctcgtctctcctacctttcagagagttacccattaagtgctgcgtttggttcttgacaaaggacgccacaaggtccagttgatttgtctctggggggagaagggagaggacactccagtgagccccccagagagccaagtgacctcaccccctccaggcctggccccgacccctcttgggggcgtggtctccggcatccctcgcccagccccgctgcccaatttctcccaacacgcacccactttccccacaaacacgttcagcgcgtagtcccggaagaaaggcccctccatgcccatcagcacggccccggcgcgcgcctgcagctgctccaactggaagcgactggggatgagggcggagcgcaggtgacccagggcctccagcaccaaggggtcgcactgcaggcagccccagcctccgggggcgcccaagcccgagagcagcagaagggtcaaagccagaggcatggcggggcctttgtgacgtcacagagagaacccggcccgccccgcctcccaggcgagggcgcggtcaggaggcccagggagcatcacggtgttacaggcacgtgttcgctgagcacctgctatgtgccaggcatggttctagaacctagagagaaagtcaagaaaaacagaaagcctctgctcaacccctcttggaacttactaattcctcttaaatttattcattcaacacatattgttttattttatttatttatttattttttcccgagatggagtctcaactctgtcacccaggctggcgtgcagtggtgtgatctcggttaactgcaacctccgcctcccgggttcaagtgattctcctgcctcagcctcccaagtagctgggactacaggcgtgcgccaccacgtccggctaattttttatttttagtagagacggggtttcatcatgttggccaggctggtctcaaactcctgacctcaggtgatctgcccgcctcggcctcccaaagtgctgggattataggtgtgagtcaccacgcccggcccacatattgttttttttttttttttttttttttttttttgagacagagtcttgctctgtcacccaggctggagtgcagtgaggcgatcccgggtcacggcaagctctacctcccaggttcaacctatttttgtgcctcagccaaccgagtagctggggttaccatgccaccacacccagataatttatatatatatatatatatatatatatatatatatatatatagagagagagagagagagagagagagagagagagagagagagagagagagatggagtctcactctgtgtcacaggctggagctcagtggtgcgatctcagctcactgcaatctttgcctcccaggttcaagagattctcctacctcagcctcctgtgtagctgggattacaggcacgcaccaccacacccagctgatttgtgtatttttagtagaaacgggttttcaccctgttgttcaggctggtctggaactcctgacctcaagtaattcacccgcctcagcctcccaaagtgctgggattacaggccactgcgttcaaccttacatgcaacacatatttatttattgaacacctactatgtgccaggtgctgttcaaggcccccagagctagagctgagaaaaacaagaggttcttgtgcttgcagtacttaaattaattaactcaacaaatatttattgagcacctactatgtgccaggctccagagatagactgacataagacgaacacaatctctgctcatagagttcaggctagcagggatgggagggagtggcaggaagagaaacgtaaaacctggtacacagatgagtaactgaaatactgacaaactgcattacctgctgggaagcaaatacacagtgtgatacagttaagagagttccctgaggccaggaggtagggtctggttccctgctgttgtccagcgcctagcgtgtactagttgttcaacagatatttagcaaatcaatgaatccacaagggagggtatactgagggaagggcactttgtttttccctgcaattttcatcttgaaagttttaaaatctggagaacagttgcaaggatgacccaataaacactcagatatgacttcacattttgcattcgctgtatctctctatatatgtagatgaatttaatatcaattaaatcatagaaattcaactaaaagacattataatagtatacacagagatatagcaaatgtcaaaataatatgatatattaatatatagttaaatattaattcagagagattaaattaattaagactaaatattactacgttgagggagagaggaggagagagaggcagagtaggagagggcagttgtcttattaatagtttaggttctacaacaaaactccatagactgggtggcttataaacaacagaatttatttcttccagctctggaggctggaaatccaagagcagagcaccagcaaggtcaggttctggtggagctctcttcttgtatcctcacatggcaaaaagagggtgagaggactctttgggttcccttttttattttttaatttttgagatggggtcttgctcttgtcacccaggctggagtgcagtggcacgatctcagctcactgcaacctccacttcccaggttcaagcgattctcctgcttcagcctcctgagtagctgggactacaggcgtgtgccaccacgcccggctaatttctgaatttttagtagagatggggttttgccatgttggccaggctggtctcaaactcccgacctcaagtgatccgcaacccccctcggcctcaaaaagtgctgggattacaaagtgtgagatcaggccacaaggaggtgctcacacccaagtgaaattctctctgctcccggactgagagtcaggccttgccacccacgcctacctttcttaggatcacccagttgtctacctaatgccgtgctggccataatttgagaaatcaacctgagatattaacgtgtgcgtccttttcctcatcccctattaccatctgcctttcaggcagggagtcaaggggctgttgtttgactgaagaaggggtggccagaatgggatgggaaggccactcattcctcagcttcaagccccaaaccctcaggcctgggtgtgaggcaggaaggcttgggatgcagaaccggttttgtttatcgggttcagccatgctaatttggtaaaacataagttagatgaactatcatcagatttcacaccccagcaaaagtggctgaggaagttcccacactcgctctccaggcgcacagacgtccatcactgtgttgttgacggcactgggaggcaaaggcaagctgggtgtcctcactggggaggtgggtcgcctgtggtacaggaccctgcaagcagctagaagaacagatgagcctgtccacaccatgccatgaatggatccaagtgaaaacagcaaagagcaaaacaaagcaagcaaacaaacaaaaaacccacagtgaaacctacaactcaataccattgacataatttttttttttttttttttttctggagtcaaggttctccctctgtcgctcaagctggagtgcagtggcacgatctcggctcattgcagcctcaacctcctgggctcaagtgatcgtcctgcctcaggctcccacacagaatagaaaaaaaatacccgggtatggtggcatgcgcctgtagtcctagctacttgggagacttaagtgggaggatcgcctaaacctgggaaatcgaggctgaagcgagccatgatctcgcgactgcactccagcctggggcagagagcaagaccctgtttcaagaaataaaaaggaaaagaaaaggatgatatgtttgttcgtttgtttattttgagacagagtttttctctgtcgcccaggctggagtgcagtggcacgatctcgactcactgtaatctctgcctcctgggttcaagcgattctcctgcttcagcctcccgagtagctggcactacaggtgtgcacaaccacaccggctaacttttgtattttttttttttttgagaccgagtctcactctgtcacccaggctgcagtgcaacgacatggtctcagctcactgcaacctctgcctcccgggttcaagcgattctcttgcctcagcgtcctgagtagctgggactacaagcgcgcgccaccacacacagctaatttttgtatttttagtggagatggggtttaactgtgttggccaggctgttcttgaactcctgacctcgtgatccacccaccccggcctcccaaagtgctgggattacaggcgtgagccactgcgccaggccaattcttgtatttttagtagaggcggggtttcaccatgttggccaggctgttctcaaactcctggcttcaagtgatctgccaccttgcctcccaaagtgctgggattacagtcgtgagccaccacgcccagctgaaaaggactatatgttttatgctcatctgagtttgtgactgttcaaagctgtgcctgctgctctcatatttccagagggtttggggggctttgtgaatctcatgaagtaatgtacatacccatgtgtgtattgccagaatgaaggcatgccttatctcatttcgtccacacgaaatttggctgatgtggatgcggaggcagagcagggacagtctactcgtgtgaggtcacgcaggtagagacagagacagatgtggggccaggcaggcagccagaggtccccaggctgcaaagccctgctgagtgacactaatggcctgatgtggcgatggtgtgcagcaggcggaaaagaatgtctgggaaatggttacagggatttggcttcaagcctagcggaggcggggaattagaggaggtggttccagcgtagcggggtggggtgaggggcgttttctcatcatccacttcccatgtccagccccctccctagtacacattgtgtggctacaaaaacggtgacctgttctcatgcacagctgtgggagggcagacagggacagccacgttggaaaaccgtcaggctctatgcaggctggccacgtgcgcatcccttcctccacatgcacacacgggaaatgggtgcacacacccgccaggggcacgcagacacgaatccccttggcagcgtcctttgtaaggaactcaaggtggagacggcccaaatatccgtcaacgggaagactcgctagataaacccactgtggcgtgttcctcggatggaatcccgcacggcagtgggatgatgatctagctgcccgcaaacctctctgggccatcgttcaaacatgatgttgagcaaaagcagaaacaaaggacgacgtgatctgcaattccttttttatttttattttttgacagagtctcgcgctgtcccccaggctggagtgtagtggtgcgatctccgctcactgcaagtgatccgcctcccgggttcaagcgattcttccgcctcagcctccccagtagctgggactacaggcgcccgccaccacgcccggctaattttttgcatttttagtagagacggagtttcactgtgttagccaggatggtctcgatctcctgacctcgtgatctgcttgcctcggcctcccaaagtgctgggattacaggcgtgagccaccgtgcccggccaatctgcaattccgttgatggaaagttcagaacaggcaaaggcacgggatggagccacagctgcacgctcatctgacctgcggtccctgtaaggacagtgatgatgggaaagtgaggagagaggttttctctgcagggacaagggggctccaactgggccaccttctgaggggcctcactgcaacctctgcctcccaggttcaagtgattctcctgcctcagcctcctgagtagctgggactacaggcatgtgccaccacacctggctaatttttgtatttttagtagagacgaggttttaccatgttggccagcatggtctcgatctcttgatctgatgatacgcctgcctcggcctcccaaagtgttgggattacaggcgtgagtcaccacgcctggcctacagcctccttttttaaggctgaataatattccattgtatggatgggccacattgcgtgcattcattcatcagtcgatagatacgtcagttgcttgcacattgtgttctgcattcttttctggatgtgtgttatatttcacacacacaaaaactttaaaataacatgctttgttatttgcatggcctgggattgaatggcaggcaccccaaggcagaggcggggcccgtgacctgccccgtggggcacttctcacctagttcagtgactctcacacccacgggtggggcacggtcacacccacagttcctctcattccatcaccagcactgaggggtgacatgggctctgctcacacactgggcctggaggctgcccctcaggccagagtccccacaccctcccgaggcccaggggttctctgtacactgcctgtctccactgcctgctctctggacaggaaactggggtgtgaggtgaccacaggctgtctgcccccagccaatcctaactgtccctcttgttcctcaaactctatcactcgctcctttttctcttatgcctccctttctgcctctttctctctctctctaggtctctgtctcctccctgggtctctgtctctctctctctctctctctctctctgggtctctgtactcccctgtctctgggtctctgtcccctcccccttctgggtctctgttcctctctctctctctgagtctctgtccccctctctttgggtctctgtaccaactctctctgggtctctgtaccacctctctctgggtctctgccctcacagtctctctgggtctcttttttttcctctctctctctctctgtccctctttctctgggtctctgtccctatctctctgggtgtttgtccccttcctctctgagtctctatcccctttctctgggtctctgtccccccaaccctctgggtctctgtccctctctgtctgggtctctgtccccccctctctctctgggtctctatccctctctctctgagtctctgtccccctctctctggttctctgtccccctctctctctctgggtctctatccctctctctctgagtctctgtccccctctctctggttctctgtccccctctctctgggtctctatcccctgtctcctatctctgcccctctccctgtgtctcagtgctttgtctcctttttcctgtcttgctcctccctccctccctccctctgtctgtccctccctccctcccttcatttcttccttccttccctccctccctctctccctcccttctttccctccctccctcccttctctcctcccttccttcctttcctcttgcctgcctgcctttcagactctgtttgagaaccccatgttctgtgtgacattgggcaggaggcttcctctctttgtccctcagtttcctcactgcaccatggcactcactgggctgacctgaaactgaagggaatcactgtgtgtcctggacacctggtattagtggacgctgaaccaaacccacggcccacatgggttgagagtgtggactctgtgccaggccacatgccaaggcctagcgcctcctttcatcctcacggtgtgctgtaagggaagcaatggcattgtccccatctacagatgaggatgatgaggttgtacaacttgccccaaatcggacagtgagtaggaggcagggcgagaacttgaactcgggctgcccggcctcagagcctgtgctctaaccctacgctgtgagggtttcatattggctgttacgtgtatcggtaatcgggatttcccaacgtcagcgctactgacgtttggggctggatgatccgtccttgtaggccccgacctgtgcacggtataggatgtgggcagcatctctggcctttactcactaaatgccagcagcacccgcactcccagctgtgacaaccatagatgtccgtagataatgccaaaagtcccccacctgtgaatcactgtattcaacacagtgtgcaggatcaagaatacacggtactggccgggcgcgtggctcacgcctgtaatcccagcactttgggaggctgaggcgggcggatcacgaggtcaggagatcgagaccatcctggctaacaaggtgaaactccgtctctactaaaaatacaaaaaaaaaaaaaaaaaaatagccgtgtgtggtggcgggcgcgtgtagtcccagctactcgggaggctgaggcaggagaatggtgtaaacccgggatcgcgccacagtactccagccagggggacagagcaagactccatctcaaaaaaaaacaacaaaaaacaaacaaacaaaaaatacataggccagcgaggactcaaccaaaataaaaaaatctgaagtcctttgggcttcagaaaacaccatccagaaagtgaatggacagcaatataatataaaaatatatttacaaccgggtgctcatgcctgtaatcccagcactttaggaggccgaggtgggtggatcatttgaggtcaggagttcaggaacagcctggccaacatggcaaaaccctgtctctactaaaaatacaaaaattagctgggtgtggtggtgcgtgcctgtcatctcggctacttgggaggctgaggcaggagaattgcttgaacccaggaggcggaggttgcagtgagctgagattgcaccattgcactccagcctgggcgagaaagcaagactctgtctcaaaaaaaagaaaaattaaaaaaaaaaaagaaaatgctctggaattagatagtggtgatagttgtgcaaacatgaatatactaaaacccaccgaattgcacgttaaaatggtgaattttatggcatgtgaattatatttttaaaaaagtttaaaaggtagtttttttttttaaagagtgtgggctgtagtgtcaggatcccagctttgccccttatgaactgtgtgacctgtgcatatccccccgtacctcagcgtccttgtctgtaaaatgaagacaacattagcatctctacaatagtttcgctgtgaggggcaaatgggatgatgaatttaaaatccttgtacacagacatcgttctgtaaatgtgagctgggagcacagaggtatggcctgtgagtcacctgaaaattctgtttggtgagaactcagctcacatcctctctcccactagcccctggccccaacctgcctccagtccacctcccagccaggaaagttttatactgtatgcatgcactactttggaccaaaatctagggcctttctttctttttttttttcttttctttctttctttttctttggagacagtctggctctgtcgcccaggctggagtgcagtggcatgatctcggctcactggaatctctgtctcccaggttcaagcgattctcctgcctcagcctcccaagtagctgggactataggcatgtggcaccatgcccggctaattttctgtatttttagtagaaatggggttttaccacattgaccaggctggtctcgaactcctgacctcaggtgatccacccgccttggccttctaaagtgctgggattacaggtgtgagccactgaggccggcctctagagctttaatttttatttttagagatggggtctcactatgttgcccaggctggtcttgaactcatggcctcaggcgatcctcccacctcggcctcccaaagtgctaggattacaggttcgagccactgtgcctggccagggcttattttatgccacaacactgcataggaaagaaaaatcttaaagattgtaaggcatcatgcaatcatgaaaagctaattattttctgtacctccaagaccaaaggttttaatctcaacctaaaaaaaccccagtcatggaacatgcattaaatatttgacataatgagtgcctagatgtgcttttgagttgtagagctatttggctattaaaagtacattcagcctggtggctcctgcctgtaatcccagccctttgggaggctgaggtgggcagaccttgaatctaggagtttgagacaagcctgggcaacacagggagaccctgtttctaccaaaaaaaaagaaaaagaaaaaaaaaaagctggatgtggtggctcacagctgtgttcccagctacttgggatgctgaggtgggagaatcccttgggcctgggaggtcaaggctgcagtgagccatgatcacaccactgcactccagcctgggtgactgggtgagatcctatctcaaaaagcaagaaaagagaaaaggaaaaaagggaggaaggaaggaaagaaggaaagaaggaaggaagtgagggagggagggagggagggagggagagggagggagggaggggaaataatccagcctcaggggcatttccaaggaaaatgctgtcctggtcacaggacactgctccacccatggctgaggcaattgtccctccctcacagatcttatcagactgcaggatggtatcggtttctctttcccttgaggactcagccctccccacctcagacagcgaccgctctaggccggaaccttatctgagctccctaggcctccagaacccacccgtttctagccacacggtagacatgcctgtttcatgcgcacactcattcatagacacagcacatgcaccacctctatgccaggcacagttctagacacgggggctacaccagtgaccagctcagactcaaacccctggagctatgttctaataaaataagcacatgaaatatatagtatatttcatggtcttcggcactaaggggaaataaataaagcagatagggagggtgggaggaggtggcaggaggtgctgttaatttccagggttctgcagaggagaggagacctcaccaagaaggtgatattcaggtaaagtccggaaggaaatgaggagcaaatcacaaggtcatcccagggaagagccttctgggcagaggaaacagcaaatgcaaaggccctggggtgagaacgtgcctggcctttttttttttttttttttttttctgagacagagtctcactctgtcgcccaggctagagggcaatggtgcaatcttggcttactgcaacctgcgcctcctggattcaggcgattctcctgcctcagcctcccaagtagctggaattacaggcatggccaccatacccgactaatttttgtatttttagtagagacggggttttgccatgttggctaggctggtctcgaactgctgacctcaggtgatccacccaccttggcctcccaaagtgctgggattacaggtggaaggatcgcttaagcccaggagttcaagaccagcctgggccacatagagagatcccatcttcacaaaaaatacaaaaattagccaggggtggtgcatgcctatagtcccacttacttgggaggctgaagtgggaggattgcttgaggctgaaagttcgagtgtagcacctgttctgtgcatacactttgtgtccttctgccacaggacctttgcacatgctgactcttctgcctggaccaccttactctcccattctacctaataacccctactcatctttcaacttaaagctcaatgaggacaccttctaagggaacaccttgggatggtcctgacaaggtcaaattcctctgttagatgttctcagaacactatgcatttttccatggtagccctcagcagggaggggagtttacatttttgggtgtgactgcctgattaatgatggtcttccccacctgaacgtaagctccacgtggacatgaacttgctccctgctgtgtccccagcccctcgaacaatacctggtacacagtaggggctcaataaatatttgtcagatgaatgagtgaatgtatgaatgagaaaaataacaagaatgcaggctaacaactaatgagctcagacaggaagggataaatacaagccacgttgcaaaggaagaatgggtgagagatggatttggagagagaataataatgacctggctggggccggctgtggtggcttacgcctgtaatctcagcactttgggaggccaaggcggtggatcacgaggtcaggagatcgagaccatcctgactaacatggtgaaaccctgtctctaccaaaaacacaaaaaattagccaagcgttgtggcgggcgcatgtagtcccagctacttgggaggctgaggcaggagaatggcgtgaacccgggaggcggagcttgcagtgagccgagatggcgccattgcactccagccggggtgacagagcaagactccatctcaaagaaaaaaaaaaaagactaaactaagctgtgcctgtgtgcaaggaatgtgcatgactggcaagaaatgtgccttgtcagtcccaagatggagcagaactgaaaatggggttattctggctctcctgggctcctgtttccttaatgcttctggtccacggatcacatctcaggagtaaggctccagggctgggtttctcagccggcgctgttgacatttggggccatacaattctttgttgctgggggctgtgctgtgtgttgaaggatgttgagcagcatctttggactccacttttgtttttttttgttgttgttgttgtttttgagacaagagtcttgctctgtcgcccaggctggagtgcagtggcctgatctcagcttactgtaacctccatctcctgggttcaagagattctcatgcttcagcctccccagtagctaggattacaggcatgcaccaccaaacccggctaattttttttgtatttttagtagagacggggtttcaccatgttacccaggctgatctccatctcctgacctcaggtaatccgcccacctcggcctcccagagtgctgggattacaggtgttaaccaacgcatccagtcttggccattttagatgtcaggggacctccccaccagccaggaaaatcaatcaaaactgtctccagacattgcaacgtcccctgagggacactatttctcctgtttgagaatcactgatctgatatgatcatacctatagcagtcagaatgaaatgtgttgtgttgtgttgcaggaataaaccaaccccaaatctcagagacatgaaacagcagagatatgcttcttactcatgctaatgcccatcacagccagctgaggactctacctccacagcttcagagttctgactatcgaacccaggctaacaaatcagccactcgtgggacattgcttccagttactaaggctgagaagccaacgtgcctaaatcctccagtgccaatgaaatgacacgtattcctggtctcatttcattggctcaagcaagtcacatgacaggaagtacaatcttatatgctcagaggagcaaacaacaaaatatctgtgaacggtctattgcaatgtaccaacatttgcatataagtattcacactatctgccggacgcgttggctcacgcctataatcccaacactttgggaggacgaggcaggtggaccatttgaggccaggagtttgaaaccagcttggccaacatggtgaaactccatctcttctaaaaatagaaaaaaaaacttagccgggtgtggtgcagacgcccgtaaccccagctactcgggaggctgaggcaggagaatcgcttgaacttgggagacggaggttgcagtgagccgagatcgtgccattgcagtccagcctgggcgacaagagtgaaactctgtctcaaagaaaaaaaaaaaaaagaattcatattatcttattaaagttattttaccttatttctcctttatcttacggttatttgatttttttttctttttgagacggaatcttgctgtgtcacccaggttggagtgtagtggcatgatctcggctcactgcaacctccggctcccgggttcaagcaattctcctgcctcagcctcccgagtagctgggactacaggcgcctgccaccacgcccagctaatttttttttcttttttttcagtagagatggggtttcacgtgttagccaggatggtctcgatctctgacctcacgatctgcccgcctcggcctcccaaattgctggaattacaggcttgagccactgcgcccagcctatttctcctttatcttaaagttatttgattttttaaagttatgtgtgtaaatagtttagattacccatggactttattccagcagagtacagaggaaaaacaggacatttgtaataaaagggggaccttggcatacccaaccatgatgcacatgtatgttcaccaaaatccacgtactaaaacacggattggctaactacaggggctaaattcagtctacagcccgttcttttatgagccagagctaagaatggtttttgtttttaaagggttgtaggctgggcacggtggctcacgcctctaatcccagcactttgggaggccgaggcaggcggatcacgaggtcaggagttcgagaccagtgcggccaacatgatgaaaccccgtctctactaaaaataggaaaattagcagggcatggtggcgggcacctgtaatcccagctactcgggaggctgaggcagaattgcttgaaaccagaaggcagaggttgcagtgagccgagatcgcgccactgcactccagcctgggcaaaagagcgaaactccgtctcaaaaaaaaaaaaaaaaaaaaaaaaaaagggttgtttaaaaaaaaaaaaaaagaatatgtgacaaagtttttttgtttttgagacggagtcttgctctgtcgcccaggctggagtgcagtggcatgatctcggctcactgcaatctccacctcctgggttcacgccattctcccgcctcagcctccccagcagctgggactacaggcgcccaccaccatgcccggctaatattttgtatttttagtagagacggggtttcaccgtgttagcaatctcctgaccttgtgatccgcctgcctcggcctcccaaagtgctgggattacaggcttgagccaccgtgcccggcctgtgacaaagatcttatatgattccctaagtttaaaatatttcctctctgggccgggcatggtggctcacacctgtaatctcagcactttgggaggccgaggtgggtggatcacctgaggtcaggagttcgagaccagcctggccaacatggtgatacctcgtctctaccaaaaatgcaaaaattagcccagtgtggtggcgcacccctgtaatcccagctactcaggaggctgatgtgggagaattgcttgaatccgggaggtggagggtgcagtgagccgagatcgcgcgactgcactccagactgagtgacagagagagaccccgcctcaaaataaaataaaaaataaaataaaataaaatatttcctctctggctctttgtagagaaagtttcacaactccataaaagactgcccttagaaaccctattgtaataaccccaaactggaaactacacaaacatccatccgtccaccattgaatggataaatagattgtgttatatttgtacaatggaatgccatctagtaggggttgacaaactttttctgttaaggaccagatagtaaatattttcagttttctgggccatgtggtctctgctgcagccattgccaggcttacacagctatagaccacagtgaatgaatgggcgtggctttgttccaataaaactttatttacacaaacaggcaacagtctagagctgactccaggttgtaggtttccagcctgtgccattcagcaatgagagtcaacaatcaacatacaacctatgttaaatggaggaagacagactcaaaggagtacagactgtactgttccatttctataaagttcaagaacaggaagaagtaatctatggtgttagaagtcagaatagtggtgacccttgggagaagaagagggacaagagggcttggggatgttctgattttaaaatctgggtgctggcttcctgggcttgttcactttgtgataatttgttgagctgtacattcacaatgtttgcaccatttttgtgtgcatttattctaaataaagctgggcaagggtgctgcctgtgacagtctgatacctggcacagcagctgcacagcggaaacccccagcttctcaccggaattgggatctgacagcttctcagcctcacagctgttggagcttctcagatccactgatttagtgaatttgacacggcggaaaaattctcaggttcttacaagaaccacgcctcagtgactctcctctttcttaatctcaccactttcaaaccaggaaatgagcagagagaaaaaaaaaacaaaaaccaacaataaacccatttaaatacctctgagacaccaagggaaatgtcctaaacgccaggtaatgaagtccatgttctttactcctgggaaagcgttgctaattcatctccttcatgctgtgactcacgcatctctggtgaagagaggcctccccagaccacctgatctaagggagcagcccctcaccccagcgtttcctggcagtcttctctgctttctgttttgccttcatgagtgtaagaaactgaattttgtctcctcctaaaaaagaattgttgacatcctaacccccaatacctcagaatgtgaccatatttagaaacagggtcattgctgatgtaattagtcaagatgaggtcatcctggagcagagtgaacctctaaaccaatttgactggtgtccttataaaaataatgccatgtgggctgggtgcggtgcctcatgcatgtaatcccacactttaggaggccaaggtgggcagatcacctgaggtcaggagttcgacaccagcctggacaacacggtgaaagcccgtctctactaaaaatacaaaaattagccaggtgtggtggcacacacctgtagtcccatctactcgggaggctgaggctaggacagaggactgggacagattctccctcgtggacttcagcaggaaccagctcaggcaacactgcaaatttctggcctctggaattgtgagacaataaatttctaccatttaagccacacagtttctggtgcttggttacggctaatacagatggataaaattcagatatgggggaaggggaggatgggcattcaaggtgaagggaacagcctgggcaaaggttaggaaccaggacaccactaggcttccacagagaaggatgcgaagtttagtgtcatggggttgtggtgtgcattactataggatgctgcatctcagggacacttgacccatgctcactgtccccttctcagttccagacgtgtgtctctgacagggtctggccaggcaatcgaaaatcaccttaggtctttcaacaggaggtaatttaatagaggggattgatcacacagagcatgaaaggactaaagagttatatgctgcacagggaggcattctagagagtctgtacgtagagtacggctatctgtctatctatctttttaaatttttatttttgagacagagtttcactcttgtcgcccaggctggagtgcagtggcactgtctcagctcactgcaacctccgcctcccgggttcaagcgattctcctgcttcagcctcctgagtagctgggattacaggtgcccaccaccatgcctggctaatttttgtgtttttagtagagacagggttttgacatgttggccaggctggccttgaactcctgaccttaggtgatctccccgccttggcctcccaaagtggtgggattacaggcgtaagccactgtgccagcctatctatctatccgtcggtctgtctgtctatctatctatctaccttttcagagacaaggtctcactctgtcacccaggctggagtgcagtggctcaatcacagttcactgcagcctcaaactcctgggcccaagtgattctcccacttcagcctcctgagtagctggactacaggtgcatgtcactacacctggttaattttaatttttttaaaatagagatgagggtcttgctatgttgcccaggccggtcttgaactcctggcctcaagcaattctcctgcgttggcctcccaaagtgctgggattacaggcacgagccaccgtgcaatctatacaatctggattttaccaagtcctagaggtggtttcagctttgctcaagtttaagcagctccagctttgctgcttaaaatgtggtccatgaagtagcagcatcagcatcacctggagtttatattaaaaatacagaacctccaccccaccctggacctgctgaatcagaattttaagatccctcacaacattaactgcgggagggatgctgtgtccttgatgcatgacatcaagaggtctctgatgtcagcaggtcccacaacgggtgatactaactttgatcccatgcttaagatgctgtctacccagtttctcctctgtaaagttactctttctcacacagagctcatttgatggcttttaccaacgcacatttttagagcatatgaaactgtgagaatccctgatctagagagtattgctcaataaccataggtgtaatgacccatgtttgtaataacagccctgagtcaaggaaagagctgattaattacggcatctgtgggaggtaatttagcttaatgggtaagagttcagacttggaggcaccaaattagggacgcaggtagccaaagcgcagaggtttaaaacttctaccttcactgtacttttgtttcctattctcagtattcagctccttactatgttctctctatccccctgttgccttgttttgttgtattttttttgaaacagggtctctctctgtcacccaggctgcagtgcagtggcgcgatcttggctcactgcaacctctgcctcctgggttcaagtgattctcctgtctcagcctcccaaatagttgggattacgggcatgtgccaccacacctggctaatttttgtagttttgtagtagagatggggtttcactatgttggccaggctggtctcgaactcctgacctcaggtgatccaccctccagggtctttctctgttgcccacgctgcagtgcagtggtgcaatcatagctcactgcagccttgaactcctgggctcatgcgatcctcctgcctcagcctccagagtagttgggactacaggcatgtgctaccatgcccggctaactttttgattctcggtagagacaggagtagaggctggcctcgaactcctgacctcaaatgatccgcccgccttagccacccaaagtgctgggattacaggcatgagccattacgctcagccttgttcagcatttttaaaagcttcactgcctgcccagcgtgatggctcacacctgtaatcccagcactttgggaggccgagtggggcagatcatgaggtcagcgatttgagaccagcctgaccaacatggtgaaaccccgtctctactaaaaatacaaaaaccagccaagtgtggtggcaggcacctgtagtcccagctacttgggaagctgaggcaggagaatcgcttgaacccggggtgggggggcagaggttgcagtgagctgagatcgtgccactgcactctagcctggtgacagagcgagacaccatctaaaaaataaaaataaataaaaataaaataaataaataaataaataaaagcttcaccgcctgacattatgtcaaacattttattgtttacttgttcattgtctcttccatgagaagttgagatccaggaggacagacactctggcttgtctatgggggtattctcagttcacagcacagtgcccagcatacggtaggtgcttaaaaaattgtgttgaatttttaaaaatgtgagcactggaatcagactcacatgagttcaaatcccagctctgccccttacttatctgtctctaagtctgtttctgtgttggtgaaattgagataatggtgctgaaagggttaaagaaatatgatgcatgtgaaggttttgccatatatggcttttgaaaacctttttattttgaaataatttcagacttaacaaaaaagttgcaaaaataatgcaaagaattctcatacaaaataatgcaaagaattctcactcttcacccaagcttctccaaaggttgaaacttttcataaccacagtaaaatattatgaaataaacatggtaacatttctgtggactaatctacgaaccctttccctccctccctccctccctccctcccttccttctttccttccttccttccttccttcctcctccttcccctccttccctccctccttcccttctttctctctctctttctctttctttccctcccctcccttcccctcccctcccctcccttcccttccttccttccttccttctttccttccttccatccttccttccttccttccttccgacagagtctcactgtgttgcccaggctggagtgtggtggcacagtcacagccactgcaggcttgacctcccaggctcaagcaatccttgagccaagacctgggtcacctactgatttctttttgttacaggcgtgtgccaccatgtctggcaattttttttttttaattttgtagagataggggtctctcggctgggcgtggtggctcgtgcctgtaatcccagcactttgggaagccgaggcaggcagatcacctgaggtcaggagttcgagaccagccttgccaacatggtgaaaccctgtctctactaaaaatacaaaaattagccgggcgtggtggcacgtgcctgtaatccctgctactccggaggctgaggcaggagaatcgcttgaacccaggaagcggagtttgctgtgagccaagatcatgccactgcactccagcctgggcgacagaaaaagactccgtctcaaaaatacaaaaattagccgggcgtggtggtgggcgcctgtaatcccagctacttgggaggctgaggcaggagaatcgcttgaacccgggaggtggaggttgcggtgagccgagactgtgccactgcactccagcttgggcaacaagagcaaaacctcgtctcaaaaaaaaaataataataataaataaaaataaagagagaaatgactgattcatataacaacatggatgaatatcaaaagctttacgtggagtgaaagaaacacaaaagatcatctactataggattctatttataaaaagctctagaacagacaaaactaatctgtggtgataaaaagcagaacattagttgcctgggggtgggtggaggtgcgagttggctggggagagtgtcaggtaactttctaggacatggaaatgttctatttttttctagttgggtgtatacgtttgtcaaaactcattgaatggtatacttagcaattgtacatttaactgtctgtaaattttacctaaataaaaggaaccctaaacaaatattgaaattgaattaatgatgtgtgcaatgaagtgtttatggctgaagcctactgacgtctgcagattattctaatgaatggataagctgcagtttctcaactccagcactattgacatttgaggccagagaattatttgttgtgggaggctgtcctgtgcattgtaggatgtggttgacatcctggcctctacccactaaatgccagcagcactcccacacacacaggttgacagtaataaatgtttccagacattgccaatgtccctggggggacaaatttgtccttggtttagaattgcttaaatagagagaaggatgaatggatacatatttatccaatgcagctaatacagcatatatatatatatatatactcatatacatatactcatatatatattcatatatatatactcgtatatatatacaagtatatatatatgagtatatatatatatatatgagtgtgtatatatatatatatatatatatatatatatttttttttttttttgagatggagtctcactctgttacccaggcaggagtgcagtgacacgatcacagcttgttgcatcctcaacctgctggactcaagcgatcctcccgcctcattttttgattttttatagagaggagatctcattctgttggccaggctggtcttgaactcctggcctcaagcgattctcctgcttcggcctcccaaagtgctgagattacaggcgtgagccattgtgcccagcctaatgcagcagaatattaacagctgtagaatctagccagtggctacttggaggttcattgtacactttttccccccaaattttctgtatctttgaaatgttccgtaagtattaggggaaaaatgcatacaccctaagatccagcagtaccacttactagtgactgccctagggaaaaataattggcctgcattcacaaagaggcatgtataaaaagatcctttaaaaaaaattcccttgtctaaaatagcaaaacactgaaacaatgtaaatgcgtatcaactcatcaactgtggaattttttttttttgagacggagtcttgctctgttgcccaggctggagtgcagtggcgtgatctcggctcactgcaagctctgcctcccaagttcacgccattctcctgcctcagcctcctgagtagctgggactacaggtgcctgccaccacacccagttaattttttatatttttagtagagacggggtttcaccatgttagccaggatggtcttgatctcctgacctcgtgatctgcccgcctaggcctccaaaagtgctgggattacaggcgtgagccactgcacctggcccaactgtggaatgtttaaaatgaactatgggccaggcatggtggccaatgcctataatcccagcagtttgggaggtggaggcaagaggattgcttgaggccaggagcttgagaccagcctgtgcaaacagagagactccatctctacaaaaaaaatttaaaaaattagctgggtgtggtggtgcatgcctgtagtcccagctactcaggaggctgaagcagaaggatcgcttgagcccagcagttcaaggttgcagtgagccctgattgcaccattgccctccagcttgagtgacagagtgagattctgtcacacacatacacacacaaaaaaaagaaagaaaagaaaagaaaagaaaaaagatccttaattacatctgcaaagttccttttgccatgtaaagtagcatattcacaggcttcaaggattaggatgcagacatctttgggaagccattattcatcctataacagtgattgtactattttacattcccactatcagtataaaagaattccagttgctccacatcctcaccaacagttggtgttgtcaatcttgtttattttagccattctggtacatttcattatgataaataatatacattaattttacacatttaaaaacattgggctgggtgcagtggctcacgtctgtaattccagcactttgggaggccaaggtggaaggatcacttgagctcaggagtttgagaccagcctgggcaacacagcaagacaccatctctatgtttaaataacaacaaaaataaaaacattattctatattcattattgccacaccgaagaattatacaggctaaatatcctctgactagtgaatgtatagacaaactgtggtatatttgtacaatagagtactactcagcaatgaaaaagcatacactactgatacatgccacaacatgggtgaatctcacatgcatcatgctaaatggaagatgccagactcagaggctatacactctgtgattctatttatataacatcctgcaaaagacacaccacagggaccaaaaacagagcagtgattgtcaggagcaagaaaggagttgactgggccgggtgtggtggctcaagcctgtaatcctagcactttcggaggccgaggcgggtggatcacgaggtcaggagtttgagaccatcctggccaacatggtgaaaccccgtctctactaaaaatacaaaaaaattagccaggcgtggtggcgggcacctgtagtcccagctactcgggaggctgaggcaggagaatggagtaaacctgggaggcggagcttgcagtgagcccagatagcgtcactgcaagtccggcctgggggacagagccaggctccatctcaaaaaaaaaaaaagaaaggagttgactgcaaagaggcacaagggaattttcaagggtgacagatttgttgcgtcttaattttgttggtggttacacaggtgtaagcatttgtcaaaaagcatagaactgaggctgggcacagtgactcaagcctgtaataccaccactttgggaggccaaggtgggaggatcttttgagtccaggagttcgagaccagcctgagcaatatagtgagaaccacccccatctctataaaaattaaaaaaaaaattatctgggtgtggtggtgcaaggctgtggtggtagttacttgggaggctgaggcaggaggattctttgagcccaggagattgaggctgcagtgaactgtgattgcaccattgtactccagcctaggtgacagagtgagactccatctcaaaaaaaaaaaaagttgtacactaaaaagggtgaattttacctcataggtatacacatataaattatatatgtatctatattatgtaaaactgtgtgcaaatatggctgggtatggtggctcatgcctataatcccagcactttgggaggccgaggcgggcagatcacggggtcaggagttcgagaccagcctggctaatatggtgaaatcctgtctctactaaaaatacaaaaattagccgggggtggtggtgcgcacttgtagtcccagctactcgggaggctgaggcagaagaatctcttgaacccaggaggtggaggttatggtgagccgagattgcagcactgcactccagcctgggcgacagactgagactccatctcaaaaaaaaaaattgtgcaaatatacacaaaaattataaatttgtacatatatttaataagcctgactttaaaaagacaattctggaggaagggtctgtaagttttatcggatgccaagggacccaccgcacgtgcacaaagactaagactcctgcgggggttgactgtgcatacctgtgtcacctgccacgatgggaatgaagggagaggaaggaaggacattccaaggaaaggacccttcccaggctcagattcaggacaggggtggcccctgggccaggagcccggagtgcagggagcttgcagaggagtggtagggaggaggaagggggtgggttgaaaccagatggggactcggtttctacctttgtcaccgggctattatcatctacacctctccatatattcgttaatcatacacctgctttatctgccctcccagcctgcattccattcgggcggacagatgtccctgaaggcccgagggacaccagccgctatgccaggctccaaagaacccgaggcaaaccaacgctggtcccggtctttgaggactccccggcccagtgagggagaccgacaggtaagcaggcagtgtccaagcctggggaagaggctgtaaggcagacaccgcaggcactggcagggctccctatggaacaatcagggaagacatcctgaagaagggggcattggggtgaggcctttcccccatgtaatgaggccaagcccaataataataatgatattaataataatggccactggccgggtgcagcggctcacacctgtaatcccagctctttggttttgtcatttgtttgttttgagactgagtcttgctctatcgcccaggctggagggcagtggcacgatctcggctcactgcaaccccgggttcatgtgattctcctgcctcagcctcccgagtagctgggattacaggcacctgccagctctttgggaggctgaggcgggaggattgcctgaggaagggagttcaagaccagactggccaacatggcggaaccacatctctgccaacaatacaaaaattagctgggcgcggtggcgcgtgcttgtagtcacagctactcgggagactgaggcaggagaatcacctgaactggggaggcagaggatgcagtgaggagagagcacaccactgcactccagcctggttggcagagcgagactgtctcaaaaacaaaaagtaaataataataataataatagtagccaccagcatttatcgagggcttgcaatgggccaaaatcactacgctaagcacaggacgtgaactaattaatttaacccttcaacagctgtaaatcttttcccatcctgccttcctgccttgccctccctccctccctccctccctccctccctccctcccttccttccttccttccttccttcctttcttccttccctccttcgagacaggatcttgctccgttgcccagactggaatgtgcagtcgtgcaatcacggctcactgcagcctcaacctcctgggctcaagtgatctgcccacttcaacctcccaaagtgctggggttacaggcgtgagccactgcacctggccagcagatacttttatcactatcccccttcttacagatccaggaacattgaggcacacacttgtttccttccctcaaaatgttcctgctgtggctagggagatggtcatggacacagtgtcagtctggtgaagctgtgctttgacggtagcagcagaaggcattgaaaggaagtgagaggagagagggactgattctggctggggaaggaacggagggttggggatgccgcttgcagaaggcttctgagaagcgattgccctccaggacagatccttttatagggcgtggactttggtgcatagaattccgtcatattttccgttcctgtttctctatcatttgtccatatcccgattttgctttctttcttatttttctctttaatgctccagcctcactcctgttacctcctctggtgccccataaacaaaccctaacacctttaacattcacgcaatcttgggtatgtagaaatgcttacagaccagacagcattgcttcgtgtaattatatcttctaaattgacacaaaggataaatgctatcttttaaattgtgctatagactgttttatttcctactgtttcaattcaacattaatttttttttgttacgttgttttttgttttttaaaacagagctggtgccttagcctcccaagtagctgggatcacaggtgcgcaccaccacgcccagttaattcttatatttttagtggagacggggtttcgccatgttgcccagggtggtctcaaactctcggcctcaagcgatctgcccacctcagcttcccaaagtgctgggattacaggcctgagccaccatgcccggcccagtattatgtttttatgatctctccacgttaccaagtgaaactgatttattgcttccaggacaacatggaggaatccactcccttttgcttaccagctccccacgaaacagacctcatggtgttctctacctccctattcccacccgtaatgctgccctggtcatcctggggtatgtccttgtatgttacctgtgcatgcttctctatggtacctacttggaagtgggatcgctggatcccgggagaaatgcacagtgaatgtcacaaaattctgccccattatctaaggtgggtcttgaagctctagcagcatgtcaccaggcagagaagggcggagaagggaccaaccagttcaaaggactgagagtccacagcatgtccagggttcagtgaattataggtgacccacccgaggggtggaacctttcagggaacagccgtgtaataaacacttgactgcactggtttctttttcattttttttttttcctaaaaaggaaaatagtcttgttgtgggtggcagcttggcaacgtctatgaaaatcttaactgcatatactctttgacctagcaatatcactactcatgcatgaggaagtaggaagaaggaggctcagtgtgttgcggtctgtaaaggtggaacaaggaaaaccaccagcagccccaccaatcggcgaggagtcaaaggaaccatagataggctgcggctattggatactgtgtggtgtagacaagataaaggtgaattaaaacataggagcacaggctgcgcgcggtggctcacgtctgtaatcccaacactttgggaggctgaggcgggtggatcatgaggtcaagagatcgataccatcctggccaatatggtgaaaccctgtctctactaaaaatacaaaaattagccgggtgtggtggtgggcgcctataatcctagctactggggaggctgaggcaggagaatcgcgtgaaccgaggaggtggaggttgcagtgagctgagatcgcgccactgcactccagcctgggcaacagagtgcagctccgtctcaaaaaggaaaaaaaaaaaaaaggcgagccagatttccctatatcaagtatcatcctatatccctgaactcaagagatcataatatttctcagttctgaatctatatatgtaaaccaggagttggcaagctttttctgtaagggctcagattgtaaatattttcagctttgaacatatggtctctgtcacaattgcttaactgcgtccttatagcatgaaagcagccacagccacagacaatactaaaccaacaagcatggctgtgttccaataaaagtttatttataaacccaggcagtaggccagtgtggcctgtgggctgtcatttgctgaccccaatgtaaataaatagtaaatgttagatccggctcagtggctcatgccactgagcactttggggagccaaggcaggacgatcacttgaacccaggagttcaagaccagcctgggcaacatagtgacacctcatctctacaaaacaataaaaaaattagccagacgtggtggtgagtgcctgtggtctcagctactctagaggctgagatgggcagacagcttaagcctggggtggcaagtttaggctgcagtgaactgtgattgcaccactgcactccaggctgagcgacacagtgagaccctgtctcaaaaaaaaatatttgtggaagaaattacaacaaaataccaggggtacatctggaaggcagagtgaaaaggaagggcctggtcaagggaaatattaccctcgtgtttacattttttctactttgtgtaattaaaattgctttaaattaaaaagaaaaaagtgttttaaaaatagctttggtgaccttcttctttctgatcagcatcttagaaatgccagcagcagcagggcctagtgggtcacacctataatctcagcactttgggaggccaagaagggaggatcagtggaggccaggagtttgagaccagcccgggcaacgtaacgagaccctgtctctatttattttattattactattttttattttttgagacagagtcttgctctgtcacccaggctggagtgcagtggcacgatcttgattcattgcaacctccacctcccaggttcaagcgattctcctgcctcagcctcccaagtagctgggattacaggcgcctgccaacacacccagctaatttttgtatttttattagagacaggggtttcaccatgttgaccaggctggtcttgaactcctgacttcaggtgatctgccagccttggcctcccaaagtgctgggattacaggtgtgagccgcagcgcttgggccccatctctatttgaaagaaagaaagaaagacaatgccggcagtacatgaaagcaatgaggaagcaaagttctctagcaccctaccagctagaggagaatttctcagagagtttcttttattcacttagcaggtatttacccggcacttaccatgtgcaaggaactgtcctaggtgctagggatagaacagtaaatgaaaccgagtccctcccctctatagggtggatattctgcagtcagagagacaggcaacaaataacaaacacaacaaataaataaatggtatagcaggtgagaaggtcagaagtgctatggaaaggcagaaacaaggggcaagtaaaggggatggaggtgcctggtgccaggtgaggcattaaacagagtgaccagagaaggcttcattgcgaaggtgacatttaaacaatggcctgaatgaatgaggcgagagctagggggatgtctgggaggaagagtgttccaggcagaggcagcagccgtgcaaaggccctgaggtgggaacgtgtcggttgcatttgaggaacagcaagggagcaagttggctgtagtggcatgagccagggggagagggtgagaggtgaagagaaatgaaggacaaagcaggtcacagcctgcacagccccgtggtccatggtgaggactttggttttactctgggccacggtgaggtgggggcggtgtctgagcagaggagggacaggagctaacttgaggtctaagagggtcctctgactgccctgtgggagcagacgcagtgggaagtggggagaccagagaggaggcacctgcagtggtccagaaaggagatgatggtggatttgaccagagtgaggcagtgggggtggcaagaaggggtcggattctggagctagagctagagattatatagatatagatttttttttgagatgaggtctcactctgtcacccaggctggagtgcagtggcgcgatctcagctcactgcaacctctgcctcctagattcaagtgatcctctcgcctcagcctcccaagtagctgaaactacaggcatacaggcatgcgctaccatacccagctagctttttttttttttttttttgagatggagttttgctcttgtcacgcaggctggagtgtaatggcacaatctcagctcactgcaacctctgtttcccaggttcaagcgattctcctgcctcagcctcctgagtagctgggattacaggcatccactaccacgcctagctaattttcgtgtttttagtagagacagggtttcaccgtgttggccaggatggtctcaatctcctgaccttgtgatccacccgcctcagcctcccaaagtgctgggattacaggcgtgagccaccattcccgaccttttttttttttttttgagttggagttttcgctcttgtcgcccaggctggagtgcaacggcatgatctcagctcactgcaacttccacctcctgggttcaaacgatgctcctgcctcagtctctgagtagctgggattacaggcgtctgccaccacgcccagctaatttttgtattttcagtagagatggggtttcaccaagttggccaggctggtcttgaactcctgggttcaagggatctgcctgcctcagcctcccaaaatgctgggattacatggcatgagccgccacatccgatcagattctggatatattttgaaggtcacattgacatttgctgataaactggatgtagaggtaagaaggaaagaggaatcaaggatggcgctaagtgttttggctcaagtacgatcaagagccatctgccacagatcacctggggactcgtaaaaatgcaagtccctgtccccgcctggatctactcagctggcaactctgggtgggacccaggaaactgctttctgagtaagctgcccaggaaaagactagaaacccagaggcaaccatgatcctcttggggtgggggggggtggtcgtctcagggtagaacattagagtggttgcaagactccccaggttcaaatcctggccctgccattccacctatgtgagctggaatgataccttaaattctcccagccacagtttcttcatctgtaacaagactatcgatggtgcctgcctcacagggctgacttagggcctgaatgagttcatgtgtataaaatatataaaatggtgccaccacatacaacttcccaataagggcagctagaattagcatccagttccaaagatgatgaattcttctttttttttttttttttggacagtcttgctctgttgaggttggagtgcagtggcgcaatctcaactcactgcaacttctgcctcccaggttcaagcaattctcctgcctcagcctctcaagtagctgggattacaggagcctgctaccatgcctggctaaaagatgatgaattctaataataaaatccacaccaaaatattatcaggtgtcagaggtacattttgttggttaagtgaaacagaggatattggtcaagggaaacatttctctatcccttgattttttccatcttgtgtaattaattaaaattgttttaattcaaaaataaaataatgttttaaaaatagctgtagtgggccagtcttggtggctcacacctgtaatgagcactttggttggcaaaggcaggaagatcacttgagctcaggagttcaagaccagcctgagcaacatagggatacccccatctctacaaaaaaatctcaaaaaaaattagctgggcatggtagcacatgcctgtggttccagatactcgggaggttagatgattcaatatgtatatataagtaagcccaagcatcataaaagtattatctattattatttggccaaacatgaggagtcagacgttttctcaaagggggaacttttagttgggttttgaagtatgagtaggagctcaccgggtgacaaaaagtcatacttcctttcattatcttagtcaagacactcccttgaggcatgctgtgttccagatcttgtgctgggagatcccagggacctaacatgagtctgactctgacctacgcggagctactagtcccagggatggatcagacctaagccctgtcctctagtgcctccaagctggtaggagaggcagagagggatacaattcagggtgaccagggcaagcagagagaggaacagagtgagtcatggactccgagcaggtcagcactgagcaaaagctttgaaatggctagtctgacccccctctcccatttactaaagcctggagagggacagggtttgctcaagattacacagaatgaataaatatcctgatcttggagtctggggatttcaaggaccaaacgagatgccagagatgcagacctgccccctcgcagacccttcacccagatgcccaacacaccccaaatccccactcaaatctgcagactaacccctggccccgcagacaatgatgctgtcagagatatctgcctccccagccctcaggctcagagacccacttcatccctcacccacatgcacagcacacatccctgcaagcccttatcatcctatgtgccctgtgctgggtcaggctggacacagacgtgactcagatgcaggttgagccctggaagggctgctagtgtggaaaggtaccaggagacagagcatcccaacccagtgtgaagagtgtgtggaagccgtggcagggcatgggatgggaggagggtgagatgagatgagggaacccttaacacgctttgaaccttgggaagttcacctggagtttcctggcatggggagatggaaagagggagtaacaggcagaaagcacagcatatgtgaagccacaaaagcatgaaacactatttattccttcatccatccatccatttatccattatccatcatccatccatccatccatccatccatccatccatccatccatccatttatccatccatctatccatttatccatccatctgtccatttatccattcaaccgtccatttatccatccatccacccatccatttatccacccatctatccatccatccatttatccatccatccatccatccatccatccatccatccatccatccatccacccatccatttatccatccatccatctgcccatctgtctgtccctctgtccatctgtatgtttatctgttcatgtacttatgcattaatcgattcttccatccatcttatttatttattcattgtgtatatcattcattcattcattcatgtatccatctattcaaatgatcatctgccccctcattcatccatttatttatccactcattggtcacacatgcatccgttcatatagttatcagcatcagctgtcatatgatccttccccagcaacacctcctcagagagcctttccgaaccctttctaaaataatacccagccaccttgcctctattaccctcctttttattttcatcacagccctgaacgagacttgccattttgccctgtaattgtatgtttacttgttcggtgtctgtggctaccatgagaacatgatcatttattcaatgagtgtttctctctttttaaaatttaacttttaggggtacctgtgcaggtttgttattaggtaaattgtgtgtcacaggggtttggtgtatggattatttcatcaccccagtaataagcatggtagcccagacaaatatttcttgagcatcactgtgtgccaggctctgttgtagacactggggataacagagacaaaatccccttctgcatgaagctgacattctagtggtgatgtcagacaataaacataaacataaataaacataaaggtagtaaataaattataaggcatgttggaaggagggtgctgcggcaaaagaaagcatagagccaaatgagggtgtcaggggtccagggggatgggtgctcaaggaagacctcaccaaggaggtgatagctgaacaaacgctgtgggggagagaaggagcccaagcggttatccaggggaagagcattgcagttagagaatggcacatgcaaaggccctgaggcaggactgagcctggtgtgttttggggacattaagaaagccattgtggctggaatggaatgaggaaggaggagagagcaagaggtgggggcagagagggcagagaggggacagaggggaccagatggagcagggccatgtgggggaagactctgttttcactctgagtatgaccagagccagaggaggattctgagccaggaagaaacaggatccaactgcctgcaggatgtggttccctctgcctgccatatagggagtagattaatacctgagttttgtgagagccaggatcatgtctttgcacctgtcgcctcctctgtgtctgggtgaagtctgggtggggcacagtggctcacatctgtaatcccaacggttttggaggccaaagtgggagggtcgcttaggcccagaagttccagaccagcctggacaacacagcgagaccctgtctctacaaaatcttaaaaaaaaaaattagccagggccaggcacggtgactcacgcctgtaatcccagcactttgggaggccgggttgggtggatcacggggtcaggagttcaagaccagcctggccaacatggtgaaaccccttctctactaaaaatacaaaaaaaaaaaaaaaaagctgggcgtggtggagcgcatctgtaatcccagctactcggagggctgaggcaggagaatcgcttgtaccgggaggcagaggttgcagtgagccaagatcacaccactgcactccagcctgggggacagagcaacactctgtctcaaaaaaaaaaaaaaaaaaaaattagctgggcatggtggcaagtgcctgtagtcccagctactcaggaggcttagttggaaggatcgctcgagcccaggaggttgaggccgcagtgagccatgattgtgccactgcactctggcctgggtgacagagtgagaccccatctcaaaacaaacaaacaaaaacaacaacaacaacaaaaacaaacgaaataacaataaacaggagtctgcaaactacagactatagcccactggccaaattcctcctgtctgcataaataaagttttattggaacactacctcacctattcatttgcatattgtctctggctgcttttatactgcaaggacagtgtggcacaattggagccaaggcttctgtcccgcaaagctgaaactatctactgtctggccttttacatgaagaagtttgctgacccctggtctagaacaattcttggcacacagtaggcactcaaaaaataattgttgcagaactgaacctgtcactcatctgtgacccacacggggttgctagcttgctcttgtctcagagccagttccagctccgagtcacatgcaggaaaacaacagcccagcgaccaaaaataaaatactggaaccattccagtctttgctgcagagaaaatgcccaggcaggattgcagtcaggacccatggcaaaacttagcaccctcttcctccttttgctctagtaagactcaggcccctttccctccatcaggcatggaaactgctccctaattttttttgctcaaaatttccccccaaactctcttccacaaagctgccctgtccttggttctcccgtctcttcccctttcagctccaactttttatcttctttttctttttttctcaccctgtcttttggtgctgacagctttttgttttcatcagcttagttccttgctggctttccccacacctgtgctgctccttactcagattctgcataacgaggtcacgtctgggggctgtgccagctggtgggaatccagcttccctggaggctcagaatgcccccatattcccctttccttttccccggcacacacccgtcgtggtattccatcccccttcactgtctgggttccctctctgctgcagctgatacccacaggacccacagaggggtcagccctggacagccaaggactcacaatttaatgtgaatgatcccagtgcctggagttcagagagggatggctgacggggtggccttgatccctgagataatgagtttggggctttatcctgaggaccttctctggcaggcctggatggaggacagatggagaacttagaggcagtggagtgcctcctttggacttgattttctgggtctcagcctccctctgctggctttgtgcagcccaagctctacagccagactacattgattcgaattcaggctctgccacctttaaactgtgcagactacattgatttgaatgcaggctctgccacctttaaactgtgcaaccttggtcagctgtgcctcagtgtcctcatctgtaaaatgggtttgacattagaacttaccacttagcgttatcaggaggattataggatttagcacacagaaggggcttagaactgtgcctggaacacagtaagcactcaataaataccagcaactttcaaaatgctgatacagccgtccaccacatagaatgccctccgcaaaagaaagctcattactatcactcagtgatgtcatcaattacctcatagactgagcagaattgatgacatctccaattatgaggtcaatttagaacctggtgggcatgatgatatcacaagttgccaggtaaatctacctgggtaatcccaggctaaatctagccctgggtagtgttgatgacatcaccagttaccaggcagattatagttaaaatgtgggtgcccagtgccttctttcctgtttgaaattctgttgtgtcccagtccatactctttcctagcaccgttgggaacaggactttcatgtctctggacctcaatttttctttctttctctttctttctttctttcttctctctcttttttttttttttttttttgagttttttgtgatagagtctcagtctgtcacccaggctggagtgcaatggcacaatcttggctcactgcaaactccacctcccgagctcaagcaattctcctgcctcagcctcccaagtagctgggactacaggcgcccactgtcatgcctggcttatttttgtatttttagtagagatagggtttcaccatgttgggtaggctggtctcaaactcctggcctcaggtgatcctcccacctcagccccaaaaattgctgggattacaggggtgagccactgtgcctggcgtggacctcagttttctatccatcaaatggggataataaaagcaccagcctcgtagggttgtggagagaatccaatgagttaatacataaaagggcaaaatgtccagcacacagtcagcactccatacacagcagcactcattatctttactgtaggatgtttccatggagcacgctccagccagagtgacaggagccctcagctctgtcttggttaagacagatgcctgcaggggcctgtttcctaggagttggagcccagatccgccattagcagtagtcaggagaccctggacatgttgctagcctataaagtggggtaatgaccatgccagcctcacggggctggcatgaggatgcactgacataatgacagtcatgtttccagcacacaatcagacctcacaactgtgagctgtgttatcactgcgagtactctcagaaaggtccttttctccccaggatgttgtttccccatctgcaaagaagtggaaggtggctgtggcaatctcaaagccatggcaatcttgacactatgaccacagggatggtcctgtgattcacctttgctgttgctgagcaagtgcattgggagttggatgcttgaatctgtgtctgccctcagcacccaactccagcttctcttgtctcttttctgcccatctcttatctcccaacatttcctttcatatttctttggcttcttgctcgtacgctagacttcgtatgtatatagtttctctcctgcatgctgtttgtaggacaataaatggcaatagtcatgataatcagtattttctttttcttttctttcttttttttttgagatggaatcactctgccacccaggctggagtgcagtggtgctatctccgctcactgcaacctccgcctcctgggttccagtgattctcctgcctcagcctcccgaaaagctgggattacaggcgtgggccactatgcctggataatttttgtatttttagtagagacggggtttcaccatgttggccaggctgctctcgaactcctgacttcaagtgatctgcctgcctcagcttcccaaagtgctggaattagaggcgtgagccaccgctcctggccagtactttcttattcagccttttccctggtgccaggactgtactaagagctttgtaggcactaattcacttaatccactcaatacaagcactcattaccatttactcaacaaacacttattaaacacctactgtgtgccaggcactgaggattcggcactgaacaaaataaagatctttgtcctcgtgggacttaaattctagtgaggagacagatgataaacagataaattagcaaacactcccagtgctatgagaaaaagcaaagcggggttaaacgagagagagtgatgagaggaactgtcttatataggatggccaggaaaggcctcttggaagaggtgatattggagcagaacggatgatgtgggagagaggttgtcatgcaaaacctggggaagagcattcctggtggacccaacagagaatgcaaaggccttggggcagcaccaggcctcctggtttgagaaattgagccagtgtagctggagcagtatgaaggggagggcctgggggtgagatcagagagagcaaaagggccagccacatcccgcaggacctcattggccatggtgagttcttagacttttactgagtgaaatgggagccatggaaggctctgaacagaggaaaggccccatctgaatagagtagactgtagggagagcaagggtgaaggcagacagtccatcactcccattttacgagtgcagaaataaatggaatctcaaaaaagtccagcaactggcctgagcccacacagctgctgagcagccgagccaagctggcaggcctccttgggttcagtggagccattcctttgtgcccttggctctttttattttccttttaaatagagatggggcctatgttgcccaggctggtcttgacctcctgggctcaagtgatcctcccaccctggcctcccaaagtgttgggattacaggtgtgagccacggcacccttccaaccttgggaagtcttttggctctcctgagcctcagttttcccatctgtaaattgtaaatggggaatcattaccacgtttgggcatagcatggcggttaaaagcacaacttctggttggatctgagtccttgctctgccatcggccagctctgtgactttctgcaattaacaccctctttctaagcttggggttacctcatctagaagatgaagatcttaatagcaccaatttcaagggcttcgttgtaaggattaaatgagatcatgcaggtaaggcgcttagcacagctcccggtctacatcgaagtgcttgataaacgatcattgttattccgatagtatcacggcccacacctccccggtgggtgagagcctgggagggtgcctggtacatggtctacgttcgacaaaagtgaattctgtctcctgtctctcctgcccgccgggtcccgggggacccaggcattccggccttcggtcggcccccccacgccggcccttacaaaggcccccattcatgccttgcgcacaaagcggcccattcaccctggccccttgggcctcccgcccccggccgccccccgcgcctcgctattggtggcgccccgtgcccatcaggcctcggcttccacccccgaccgcgccgcctagctccgcgcccgggccgcgttcttttcccacggctggcacccttcgacaacttctgattggcccagcccgccagccgctctttttgattggcggctcccgtcccccaggggcggggccgtagcttgccgcagcgggcgccgattggcctctgctgctctcttgggggcggggctgtcctggcggacacgcccctctttctccccaggccgaagcctcgggacggccctggaagccggtgagtgcccggggccggcagccctccgggggcggcggaacgggactgagccaggggaagctggagcctgggggctgcgatcggggcccgggagcccgggcaggcggccggggacggcggggaggtgacgcggacactcaccttgggcgcgcagcgggacggcggcgagggaggtgggggggcgggacgtctacactcccccaactccagttgccgccgtgtgcgaggcccggtcggggtcctcgttgtcagccccgggcctgttccgcagaaggggaaactgaggctgtctttggaacctcggccgctttaatacctgagtcatcgcctccagtcccccgcccccagcatgacatgtctctgttctcacgtgtcagaatcggaggccagagagaggggtcgtgactggaagaggcggaggggtagggaaggacatatttgagaacctatgatgtacttggacgcttttattttttataactaaataatttcctttccttatcgtgttgactcgaggtgagttatattgtacccattatacagagaggggaaggctgagactgggccgaattggtgactgcagggggacctggtggagaagaacactccagagaccaactgtgtgctgggtcctttaaccttttcagtcccacaggagtcccctaaggaaagcggtggtccctgtggcatagatggggaagcaggttggtagtaatcaccaactgggacgcagaaattcatgtctttagggacctgctacaagttctttccagaccccctcctttagaatggcagaaaacggtataggcttgaattccagacctccctcttacgctgtgtgatcttgagtgccttactttgacccttcctgcctcagtttccacatcagagaaatggacatgctgatcacccctatgtcattggttgttgaggttattctaggccgggcgcagtggctcaggcctgtaatcccagcactttgggaggtggaagcgaaagaatcgcttgagcccaggagttcgagaccagcttgggcaacacagcgagacttcgtctctacaaaaagtaaaagagttagccgggcgtggtggcgtgaccctgctgtcccagctactcgggaggctgagcagggaggatcggttgagcccaggaggtcaaggctgcagtgagccatgatcgtggcattgcactccaagctgggcaacagagagagaccctgtctctccctctttttttttttttaaatcattttatgatctcaaagagctgttctaagaggagaaaatacccgacacatagtaggtactcttatcaccatgtagtctttatttcactcccgagactgaagctcaggacagaataccattgtcctcttctttggtactcttactgtctatagattttgttgttcccttcccgcagttgggaaactgaggctcagggagattaatgatgaagcactgggctggggaactttctgaacgtcgttttattaatttcactggccgcaatgcacagcagggaaagctgaggcccaggaagctccagcggggtttgaatcccgggaatcctcagccttctccgcggcgggccctcgacctttgccctccataagggggaggagcccctggcgccgccgccgccgccgcccacctggcaacaggctcaacccccgccttcccccggcccccgtcagaggccctgaagctccaggcccgccccgttcccagccgggcaggtgctgggtgacatcagagccgggctcccgccctgtgacgcgacggggccccgccctgcgctggaccgcggaggtcgctgcacctgaagagaacggggattcccgcgccctcaccccatctccccgctccggtcggcgcccccaggtagccccgaggatctgcgagttgagggggcggcgacacaggcgcttgggtccaggggaatgggtacggggctctcagactcctggatctgagaaggggccttgggggccggctgtcccaggtctgaggaaggactgcgccgcgagcccgaacttctgggtcctgggggaggaaaggactggggccaggactgcagagctggggtcttaggggaggagggggctgcaagcccggattctggggtctgtaggagcaggggctgggggcctgaactcctgggtctgagacaggagggcattgagtactgggactccggaaacccagcgctagaagccagggtcagacggctggatgccaagggccccaacctctgccccagggcggatccctggctgcttttctttttcaagcccagcagtctcggcccctcccagggcaggtgctttcacctgcccaggtgacagtaattagccctggcagagtgttcctgctggttgaggaagggtagggcagtcagagaggctcggccacttggagccaaggcctgcaggccctgcccgccccatcagggctgtgatccatcttcagaactcagcatcctcacctctagcccggctgcagtgaggtgagggggcctgcacttcccaatccataggaggagggggctgggggctcagactcctgggtcctgggagaggaggaggctgggagctcggactcctcagcctggggaaggaaagggctgggggcttggactcttggctccagggaggagaggcatagggcatagggtgattgcaaaaactccgaaacccttcctggtcaaaggccacagggctggtgaggaagtggatggggtggggtggggtgggtgggggtgagggtaaagtcccagggatggagtttgggtccggtgtatccaggtcacactggagatatggggtgagccttgacgatttgggggccacggggtggagaaactccctgctgccttcagagtgcaagggtccagcgtttgaggcctgagagcctcagggccaagagtcactggaagctggagctgctgggcttggggatgggaggagagggtctgggaggaagtgggtcctctcagcggagctgggattcccgtgggagaggcttgagggaaaggcaggagtctgttgggaccagatccaggggggcctccagggcagctgggcgtttagaaggacttctccaggggtatgtgggagcgaggtggggacggcagttgcatataggtctatcgggcagaggtgaagtcctgctgttggggagacagaaatctcccactgtttctgtgactgatgtggtggggcagtgatggggacatttgaggcagtggatgagagtaggggccgggcgtagtggctcatgtctgtaatcccagcactgtggaggccaaagcaggaggatcacttgagcccaggagtttgagatcagcctgggtaacatagggagaccctgtttctaccagaaaaaaaaaaaaaaaaaaaaaaaaaggctgggcctgatggtgcgcacctgtggtcccagctactgaggaggctgaagtgagaggatcacttgaacacaggagttgaggctgcagtgagctgtgattgtgccactgcactccaactccagcctgggcaatagagcgagacctatctctaagaaaaaagagagagagagagagagaaagagagagagagacagagagagagagagagagagagagagagagagagagagagagactaggggcagacttctttagcaggagggggccacgcagcaggatagggagaatatttttcctgcctggtgcttggaccgcgttggaattgccactactgcccatggcccgctggatggtgggaggggcctaacacattctagttcccccagcacctggttgcctccgagatagctggagctggatccacccctaggccaggagctcctccaggcagggctcccagcctactcttctctgggtcctcaggcccactcggggcggagtctcgtacttgaaagtcctcagagagttgaatgaatgggtccagtctccccattttatggagaaggagtcaggttccagagaaggaaggaattgttcactgaagcagtgagattcgagtctattctgcaggcatgagataggcgtgaccagaggtggtcagggaacctgaatgacaaaaatcaggtcaattcccaccctgggctcatatcttagagtaaaagcaaggttgtaccttttgtcccctctcttacatcccctcccaccctctgcccctcgatcatttggctctagccatgctgcctacctcacagtgacacagccacacagatgcattgtggccccaggacctttgcactgctgtctggaatgatttttctcccaacaacccccttcctcgctcctgtcatctcccttgggtcttcatttaaatgccacaccagagaggccctccctggccaccctaatgaaaacttcaacatcctcaaccctaacatttcctgtcccctggtttattcctccccttggtatttatcaccatttaatgtactatctggccgggcatggtggctcgtgcctgtaatcccagcactttgggaggcccaggcgggcggatcacctgaggttaggagtttgagaccagcctggccaacatggtgaaaccccatctctactaaaaatacaaaaattagccaggcatagaggcatgcgcctgtaatcccagctacttgggaggctgaggcaggagaatctcttgaaaccgggaggcagaggttgcagtgagccaagatcaagccactgcactccagcctgggtgacagagcaagactctgtctcaaaaaacaaaaacaaacaaacaaacaaacaaacaaacaaacaaaaaaacccaacaaacccaccaaacataccatatttggtttctgtaaaaaaataaaaaagagagagagaatttttaaaaaacaaaaaccatactatctaatttacatttttaatctttttatctgtctcctgggattacagcagctctgtcaaatagcaatataatacaggccagatgtgtaatgtaacattttctagtagccacatttaatgataaaagtaaaaaaggaacgggtaacattaatttaatgatatattttatttaacccagtagattgaaaatattatcatttcagcatgtcatcaaatatttaaaatctcagcaaactatctttttgttgtactaagtcttggaaatctggtgtgtatcttacacttagaactccagatggggatatttatatttaaattttaagatggggctcggtggctcacacctgtaatcccagtactttggggagccaaggcaggaggatcgcttgagcccaggagtttgagaccagtctgggcaacatagaagaccctgtctctacaaaacaaatttaaaaattagtaggcatggtggcatgcctgttaatacatttattttttaattaataaatttcagacatgaatcacctgaggctgggaagtcaaggatgtggtgagccgtggttgtaccactgcactccagcctgagcaacggagtgaaacctcatctcaaaataaaataaaatagattgaatttaaatgaatgaaattgaaaatgtgtttcctcagtgacacatgccacattgcaagtacccggtagtgcacaggtggtggtggcttctgcagtggacagcccggggctagaaagtaaacttttggaggcaggcgtcttcttccagcttgtctgttgctccattgtcagtgcccagaactgagcctggccaggagtggtggctcacgcctgcaatcccagcactttgggaggctgaagagggtggatcacctgaggtcaggagttcaagacctgcctggacaacatagtgagaccctaatttctacaaaaattgaaaataattggccaggcgcggtggctcacacctgtaatcccagcactttgggaggccgaggcgggcagatcaccaggtcaggggatcgagaccaacctggataacacagtgaaacgctgtctctactaaaaatagaaaacaatagccgggtatggtggcaggcgcctgtagtcccagctactcaggaggctgaggcaggagaatggcgtgaacccaggaggcggagcttgcagtgagccgagatcgtgccactgcactccagcctgggcgacacagtgagactccatctcaaaaaaaaaaaaaaaagaaaataattagccggggccgggtgtggtagctcatgcctataatcccagcactttgggaggccgaggcaggcagatcacctgaggtcaggagttcgagaccagcctggccaacatggtgaaaccctgtctctactaaaaatacaaaaattagctgggcgtggtggcagacgcctgtaatcccagctacttgggaggctgaggcaggagaatcacttgaaccctggatgccgaggttgcagtgagctgagatcacgccattgcactccagcctgggcaacaagcgagactccgtctcaaaaaaaaaaaaaaaaaaaaaaaaaaaaaaaagaactgaccctctgagcctggttcacagcctagcttattaaagaatgaatgagtgcctagagaggtgaatgaatgaaatgagtaagctgggtctgttaacccactttgcagaagtatggcaagaggtctggtaaaggaaggcagaggtggctgcctggggaatttggggtagggaagggaggcccgggggacggagccccatctgacccccaccctctttctttgcccctgcagaccatggcagccgtgaccatgtcggtgcccgggcggaaggcgccccccaggccgggcccagtgcccgaggcggcccagccgttcctgttcacgccccgcgggcccagcgcgggtggcgggcctggctcgggcacctccccgcaggtggagtggacggcccggcgtctcgtgtgggtgccttcggagcttcacgggttcgaggcggcggcgctgcgggacgaaggcgaggaggaggcggaggtggagctggcggagagcgggaggcggctgcgactgccgcgggaccagatccagcgcatgaacccgcccaagttcagcaaggccgaggacatggccgagctgacctgcctcaacgaggcctcggtcctgcacaacctccgggagcggtactactccggcctcatctacgtgagtgggctcctgctggggggcgcgtgcggcggagttgctgccggttggggaaccaggtccaccacccggctcccctgcattaacttgaggctgtttatcatctgtatcccatgtcccgtgactgttcctacacttacatggttgccaaattatgaattgttggattactaggacagcctcggaacctactggggacattgcatgatacatatggtagataaactgtattattttcctaaagtataaaacgttccaatttctcagatatagctcatcccgagttttaaggaacggaaacagatgtgtgacaatcattaatgtgaatcactgagtatagaaatgtgttgcttgaggttcaagaccagcctgggcaacaaaacgagaccctatctcttaaaaaaagataaattagccaggtgtggtggtggcccgtgcctttagtctcaccttctaggaagactgaggcaggaggatcacttgagcccgggaggtcaaggctgcagtgagctatgatgataccactgcactccagcctgggtgacagcacaagaccctgtctcaaaaaaagacaaaaagcaaaaaccttatgctaggctctgtgctaaatgcctatctattaattcattcaatctcaccataggaaagatagagtctattattattaccattttacctaagaggcaaatgaggcccagagagagttaataacaataaaaatgaacatttattaaacatttaccaaccattcttccaagctttctaaaatacattgcctctgtacattttcagaattataaagcatctgatcctcattttacaggtaagaaaactgaggcacagagagttcaaggtcacacaattagacctgacagagccaggtagtctgtcttctcactttgctgtggtgcctcttaagattgagatggggctgggaatggtggttcatgcctgtaatctcagtactttgagaggctgaggtgggtggattgcttgagcccaggagttcgggaccatcctgggcatggcaaaaccccatccctgcaaaaaaaaaaaaaatacaataaattagctgggcatggtggcacactcttgtagtcccagttacttgggaggctgaggtgggagaatcacctgagccctgaaggtggaggctgcagtgagctgtgatggcgctactgtactccagcctgggtaacaaatcaagaccctgtctcaaacaaaacgaaacaatacaaaaacccattgagaagagattgatgatacttaggttgactatggtagtcttcccacgtctgtgctaagcattggaggttcgttgcatttttaaaactctttacagcaaacggatggggtagagcagtggttcttaaccccacctctatggtagaatcatttggggaattcttagaaaataccagtgacggagccccaccccagaactttcagtcgagctctctggggctgtgacatgaacattggtatttttaataagcttccaaggaggttctaatgggcagccaaggggttattaatttcattgaacaaaagagcaaacaggattagagagattgacaaggaatatggacaatcataatgaaaaataataataagaggaggctagcaaatatttaatcgagcactcgtgatgtgccaagcactgttctaagtgtggcgtgtgagttatcagcttccctctgggccagggactgctgatatcacctgatgttcaggatgttaagtgacccacagccatgaaggaatcacgccaggatttgaacccaggcagctggttccagagtcatgctccaaactctagcttagactggtggggtctcacagctttgctccaacatccacccctctgaggttcacaaagcggaagattagaatatttttgtgaagtcccactcctacttggagatcgaggctctgagataagcagtggctggctcagggtccctcagcttgtggtggcaggtgtggaatttgaatcgagggctgtcggaccctgcatggggttggtgtcttctccagtctgcactggccctttccaaatcctcaaacacctttactagccctggaaaagaggcctctacatgatccactcccccacatctcacccaaggccacagacatcaggatgacatccaaaacatggatccactagttgccttttattcatttatatatattttttgagacagggtctcactctgttgcccaggctgcagtgcagcagcatgatcttggcttactgcagccttcacctcctgggatcaagcaactctcttgcctcagcctcctgagtagctgggactacaggcgcctgccaccaggcccagctaatttttgtatttttagtagagttggggtttcaccatgtttgtcagagctcgaacctctgagctcaagtgatctgcccaactcagcctctcaaagtgctgggattacaggggtgagccactgcatccggccactctttgccttttaataaatactctgagcgctcccagcaaccttgtaaggtatctgctgtcatccccgctctgcaggtggggaagctgagcctcagactagggggcaggatttgaacataagccccacaactaggaaccagctaagctagaacttgaaaccaggtcactgtgactgcagaccccaggtcctagccattgcactaggaagattattcagaaagttcaggagaaaaagtggtagggcctgagctaaggtggtggccagggagccagacttttggggcctaagaaatgaatgtgagagagaagattctagaattccagacaggaagcacattgggccttaataaagatcattagcacttagtgagtacctgctttctctgctgggtgctgttctaaatttctttccaatatgatcttattgaccccctccccatccacataaggttgtgaggtagggattatcaccctctttttcccacagcttggagaggggaagccatttgcccaacagaagctgatagtggctaaaatattgagcatgcagtgtttcaaggtccatgttctgttttttgtttgtttgtttgttttagacatagccttgctctgtcacacaggctggagtgcaatggcatgcttacagctcactgcagctcaacctcctgggctcaagtgatcctcctgcctcagcctcctaagtagctgggactacaggcacataccaccaagcctggctgattttttaatttgttgtagagacagtgtttcacaatgttacccaggctagtctcaaactcctggactcaagtgatcctcttgcctgggcctctcaaactgctggatttacaggcttgagccactgctgtgcccagctggggttcacattaaaccctctgcatgccacatgaacttgtggatgactcccaggcaccttatgtaggaagcactatttctgtccccgttagctaaagacactgagaccctgaaaggttgcttgctggagccacctggcctgaaaatgttacaggtgtgattcaaactctgccctatttaagacctgtgcttaatacatgtttgttgactgaccaactgatgatggggatggtggtgttgtccagtgaaaagtgggacatccagggctccagaaacccagtttctgccactaataggctgtttggctttgagttgctaagagtctcagtccctttcctgggacccttggggcagggagggaaccccttcgtagaacaccccgctctgagaaacacggaagatgcattatgtgatttcacactcagaacacttctaggtgatgggttaaaagccgcattttccagggctggaaactgaggtttagagaggacacatccttcattcaaattcacacacagctcaaaaatgctgcatctgaatttgaacactggatggcttcaaagtctgagtgatgagcctgagagtttgaggctgcagtgagccaggatcgtgccactacactccagcctgggcgacagagccagactctgtcccacccgcccccgtccaaaaaattccgagttagcctagggctcccaggtaggatgagtgatgtaagagtctccagacccatatctggcgtgtgttgcatgggccccgcctcggcctggctggtttttatccatgatctcccctaatccccacagcctttgtaatgaggtggggagtgtcgccctcggtttcccaaggaggaaactgagactatggggaaagtcaccaggctgaggggagcgggggggcaggtctgtcttcagagccccgagggctggagcagccattcctgacccttccaggagggcttccccagctgtctcccaccctgtgggggtgcaccagcctttgttcttccccccagccttgttgaccagctcaggtttccgttcccagggtgtcgccctggaaacaaggtgtggctggcaggaggggccagggtgggagggtggcgtggggagtgggttcctccgccagccaggagtgggggccggggcgccggcagccatgagataccctcccagggaatgtggtccggccgccccaccctctgagagctggggggagctcccggagcagccctttcaggcagggagggcagacacccagcaaaccggttgttctgctcctggctggccacccaggccacccaccctcccaccgttagaaggttggcacctgggaccaggcagcctgtggtggccacaccctactgtgcttgagaagctcaagctccctgggagcttaaaacagttctgctggccgggcacagtggctcatgcctgtaatcccaggcatgccggggtgggaagatcacttgagccaggggttcaagaccagcctgggcaacatagtgagacctgatctctacaaaaagtaaaaattttaaaaattggccaagcatggtggtgcatacctgtggtcccatctgcttgggaggctgaggtgggaggattgtttgagcccaggaggtagaggctgcagtgagctgtgttcatgccactgcactccagcctgggtgacaaagtgagatcctgtttctaaaaaacaaaagaaaaagatagtcctgctgctaaccagcttagaaaccagctagctgggtgactagcagagtaggttaccctactttatcacacacagctagaaaacacatctgaatttgaatcccgggtggcttcaaagtcaagcgacaagcccagagtagctaactagctaagccactaagcaggtaattctctggctagtttagctagctaactttagatagcttggctagttagctctctggctggtttagctaagtggctaactagctctctagctatgtttaactgcttctgtgagtgttgagcccctcttgcctacatgatacccttgtgagctggatttgttcttaaactgttacagagtcctgaggccgggtgtgaaggttcacatctctaatcccagcactttgggaggccgaggtgggcagatcacttgaggtcaggagttcaagaccagcctgggcaacatagagagaccctgtgtctacaaaaaaatacaccaggtgcggtgactcaagcctgtaatcccggcactttgggaggctgtagtgggagaattagttgagcccaggaattcaagagcagcctgggcaacgtagtgagaccccgtctctactaaaaataagaaaaattagcctagtggattgacacacacttgtgatcccagctactctcgaggctgaggtgagaggattgctttagtctaggaggtggaggctgcagtgagccatgattgtaccactgcactccagcctgggtgacagagtaagaccctgtctcaaagaggggaaaaaaaaaaaagactaggcatggtcatgtcagcaggactgttatgtgtctattatcagtagaaaccgcaggtatgttcctgttgcatttcggttattgcagataccacaggcacccttccagagatagtccatgcatattcaaatgaatatataaaaatatataaaaagattcctcttccatcctttcttttttttttttttttttttttttgagacagagtctcgctctgttgcccaggctggagtgcagtggcgcaatcttggcttactgcaacctccgcctgccaggttcaaacaattcttctgcctcagcctcccaagtagctgggactacaggcatgtgtcaccacacctggctaattttttttgtacttttagtagagatggggtttcaccatgctggccaggctgggctcgaactcctgacctcgtgatccacccgtctcggcttcccaaagtgctgggattgcaggcgtgagccaccgtgcccggccctcctcttccatcctttctaatgcaaatggtagctcctcacgcagtcctcaactcacctccttttacttgatattgatttgaagacagtcccatgtctatacataagagctttgtaggaatgcatcgtatgaagatgcattcaggtcgtttctagtcttttgctgctacaaagagtgcctcaaccggtcacctcgcacatggtcatttcctgtgtgagtccaggcagccacaggctgtgacccaagtctggctggctgcaaaggccttgttctctctcaggacaaatcctcacccagacagtgcctttgtgcaatttggaaagattctttgctaccatcagcctgaaaatgctcataacaaacattcaaatctacattgttatggtgtagacataccatgtgcagatagatgcccttgtgcagtgcacggcctgctcagcagccccatgacgcctttcaggccgtgggcagccatctgagaccctctcccctctcacccactgcagacgtactccggccttttctgtgtggtcatcaacccgtacaagcagcttcccatctacacagaagccattgtggagatgtaccggggcaagaagcgccacgaggtgccaccccacgtgtacgcagtgaccgagggggcctatcggagcatgctgcagggtgagtgctgggtggggctgtaggccagcgaggcggctcttcaacgggggcctgacctggggctgccggaagccagagtccaggtcaaatgacagcttgtagacttgactctgtagggcttcttagggggctggagggagcacaagtagaggcctgagtgggtgaggtgctaggtcctagagtctttttacctgtctccatgttcattgtctcttttattattgttattattattattagtttgagacggagtcttgctccgtcacccaggctggagtgcagtggcatgatcttggctcactgcaacctctgcctcctgggctcaagcgattctcgtgcctcagcctcccaagtggctgggactacaggcgtgcaccactgcgcctggctaagagatggggtttcaccatgttggccaggctggtctcaaactcctgacctcaagtgatctgcccacctcggccttccaaagttctgggattacaggcataagccaccatgcctggcctctttttaaatttttaaataaattaatttatttttggccaggcgcggtggctcacgcctgtaatcccagcactttgggaggctgaggcaggcggatcacgaggtcaggagatcgagaccattctggctaacacggtgaaaccccgtctctactaaaaatacaaaaagaattagccgggcctggtggcgggcacctgtagtcccagctactcgggaggctgaggcaggagaatggcgtgaacccgggaggcggagcttgcagtgagccgagatcgcgccactgcactccagcctgggagacacagggagactctgtctcaaaaaaaaaattaatttattttttatttcaatagtttttgggaaacaggcggggtttggttgcatggaaaagttctttggtggcgatttctgagattttggtgcacttgccatcggagcagtgtacactgcacccaatgtgtaatctatccctcaccaccccccactacccttcaccctgagtccccaaagtcagttgtgtcattcttatgtttttgcatcctcagaacttagctcccacttacaagtgagaacatacgatgtttgattttccattcccgagttacctcacttacaataatggtctccaatttcatccaggttgctgtgaatgccattatttcattcccttttatggctgagtagtattccatggtgtatgtgtgtctatatatcccatggtgtgtatatatatattttttatatatacacaccatgggatatatactctctctctctatatatatatatatgagtattccatggtgtgtatacactcacacacacaccatgggatatatatgtgtgtgtgtgtatacacaccatggaatacatatatatatgtatcacagtttatctactcgttggttgatgggcatttagtctggttccatatttttgcaattgtgaattgtgctgctataaacatgtgtgtgcaagtgtctttttcatataatagcttcttttcctctgggtggataccccagagtagggttgctggatcaaatgatatatctacttttggttctttaagtaatctccatactgttttccataattaaaaaatcaaaaaataacatgttggtgtggatacggtgaaatgggaacacttttacactgctggtggaatgtaaactagtacaaccactattgaaaacagtatggagattctttaaagatctttgttccctctttctccgaacaatattggttgggtgtggggcttttacgaacatttcccttgagacagtaattcccagagtgttcattcatttattcaacatttatcgttgaattgtagatctgatctccattgtcacggggtaaatgtagccccttagacagatggcaggtcaaggcagttgtgtacagctgagcaggttgtacactgaacaagggtatccatccaaggggctgccattcataccatgacaacatagatcagtcctggcagaattacatgattaacatctattatagatataatgcccttattatatatttgctatatatcatctattttcatagatatttagtattttttgtttatatctattaaacatttaaaaattatatctatttacatcatataacatataataggccaggggcggtggctcacacctgtaatcccagcactttgggaggccaaggcaggagaattgcttgagttcaggagctcaagaccagcctgggcaacataacaagaccctgtctctacaaaaaaatttaacaagtttttgttaaaaaaggaaaaaccccatgtaatagtacacaacattcagacccttcgatcatggcttcgaaacccatcggtgccgctcgccatttccgtcccgcaccccagcctcacccaccttcctgtctgtcaaacatccctaagtcagtcctacctcagggcctgaatatgaatatattatacttattgaatatgcatattaaatatgagcaaattattaaatttatatatttgattaaatagtataatattgtgaatatattatgcttatttaatatgcatattcaataagtattttattttattatactttatttttattatacttcatttttattttattatactttatatttattttattattatataaatgtaatgttgatttaataaattatacctattaatatgcatattcaataagtataatgtgttaaattaaatagtataacatattaaattaaatggtatattaaatagcataatattgtaaacatattatgcttatttttttttttgagacagagtctcactctgtcacccaagctggagtgcagtggcatgaccttagctcgctgcaacctcctcccgggttcaagccattgtcctgcctcagcctcccgagtggctgggactacaggcacatgccaccatgcacagctaatttttgtatttttagtagagaccaggtttcaccatgttggccgggctggtctcgaactcctgacctcaggtgatccgcctacctcagcctcccaaagtgctgggattacaggcatgagccaccatgcccggcctaatatgcttatttaatatgcatattaaatgggagtatcaaatgggaatactgaagtctccaggtagaatagtggattcatctatttctcctggcaggtctatcagtttctgctggattaattcatttaacctcgtagcaaatctatgaaataggttatctccttgtccctgatttctgggtggggaaactgaggcacagagcaaaacagtcatggtcacactggtgggtgtatgctgaggtgggattcgaacccagggcccctgaccaccgcctccctgtatgtcacactgtgtgttatatttcctcctgtgccgtgcactgtgctgagtgcattttgagcattctgagttctgactacagccctgggagatggcagctgttttgagccccatttttcagatgggaaaacagaggcacaaagcaactcagagactggcccaaggtcacgcagcaagtcagagaggcagccgggcggtgaacctgtgtgcatatagtcccccataccaggctgccaagtctgaggtcctactggacgcagcttactccctggcttgaagacacccagaggatgcctgtcctgcttaaaaaaacattcagaccctttgatcatggctttatttatttaaatttatttatttagagacggagcctcactcttgtcacccaggctggagtgcaatggcacgatcttggctcactgcaacctccgcctcccgggttcaagtgattcttctgcctcagcctcctgagtagctggggattataggtggcgccaccatgcctggctaatttttgtatttttagtagagatggggtttcaccatgttgcccaggctggtcttgaactcctgacttcgggtgatctgctggcctcggcctcccaaagtgctgggattacaggtatgagccactgtgtccagcctaatcgctgctttaaaacccatcccaccactcgccatctctgccctatcccccaacctcactggcctttctgtctctcaaacatttctaactcagagcctttcccctggctgtgccctctgcctgaaatgccacctccactgagaagccttccctgctccttcccccaagtcaattcttattacctaacaccagggttttggaatcctggctctactgacatttggggctggatgattctttgtcgtgggaggctgtcctggtcattgtaggatgtttagtagcaccccggcctctacccactcagtgcccatggagctctcctctctcagggtaataaccaaaaatgtctcccagacattgccaggtgtctcctggcgggaatggaggacataattacccccgtttaagaaccactgcttcggccgggtgcagtggctcatacctgtaatcccagcactttgggaggccgaggccggtggatcacgaggtcaggagatcgagaccatcctggctaacacagtgaaaccctgtctctacttaaaatacaaaaaattagctgggcgtggtggtgggcgcctctagtcccaggtacttgggaggttgaggcaggagaatggcgtgaacccgagaggcagagcttgcagtgagccgagattgcgccactgtactccagcctgggcgacagagcaagactccgtctcaaaaaaaaaaaaaaaaaaaaagaaccactgctttattctagtactgattcaattttcttcccagtgctgatcggtatttgattgtaggtttctgtcccctacatcttaagtggaagctctgtaggggcacacaccctgccagttccccactcccctccatgcctggcgctcagtaggtggtcagcatgtgattgtggaatggctgtgttaggcccagggcaggcgctggggtagacatcttatattacaggacctcgcttctgtctttgaatctcacatgcccagcatgaggcagcacacagtagggtctcacgttgaggtcgttgaatgaatcatattctcttcagttgagggaggctgtctccattttacgggtgaggaaaccaaggctcagagagggacagctgctttcccagggtcacacagcgagcagggggctgagctgggtggggaattagaatccaggattgttacacatcaagacccaagcttttccttactccctgggaataatttttaaaatgcagcggccagtgtaagggaccagagggccctgctagagactctctcagatgacatattcccccactctgtcccctacagatcgtgaggaccagtccattctctgcacgtgagtaatctggaaggacttcctggaggaggagaggtctgggtggggcgtggctgtgtttggaatgggcagggcaggtggggagcttgcctgaggtcattgccaacccctttgcttccccttgtcatccccacagtggagagtctggagctgggaagacggaaaacaccaagaaggtcatccagtacctcgcccacgtggcgtcgtctccaaagggcaggaaggagccgggtgtccccgtaagcaaccccgccttgggtcacccccgggccctgccacagcactgccccttccatcttgggctttccccacaattgtctcttcccctcatggaggtccttctcctagacgcctatgccacctgagcacctactgtgtgcctggggtggggctggaagcagagtcagggggacacagaggtgtgagggtcagtcttggtctcactggctctcggaatggctcctagtacttagtaggtgctttcttttctgagcacctactgtgtcaagcctgattttaggtgatcatgatgcctgggtttgtcgtctaagtgaatgttatatggtgccctccactgttccaagccctgttctcacactgccttacttacccctcgggtggggtgggtgctgttttcctgcactgaagacggagagcccaggcatgggaggggtgagtcagttgttggtcatgcaccgaggaagaggtacagtgaggccgggcacagtggctcatgcctgtaatcccagcagtttgggaggccgaggcaggaggatcgcttgagcccaggaattcaagaccagcctgggtaatatagtgggaccccatcgctacaaaaaacatttttgaataaaggaggtagagtgggattcaaacccaggagtgtggtcctccaggccaccctactccacatgcccggtttccccagtcccccttcccccaccccccatgccaccacctgagatcactggttcacctgtgtgtctgtccacgttccatgtgctgtgtcctggtccgtgtctcgtgtcccgtgacttcctcaggcctccgtcagcaccgtgtcttatgtgagtagcaggggatcacctcgagtcttgctgcccctaatgccttcccggccacccaatgcatgatcttcttggtagacagggcccaaggcagcagtggtcccacctgccagggacccctctgccccaccactgctattcatggcggccctgctgtgtgagtgtgtgcagatgggccacagacaccaacatgaaacaatccagagaacaaaactgccacttactgctgatctactaaatgtgtccagccagggcccacagatgctgcgtgcacacaaccagagtgaacagtgtagcaagggaaatacacgcatgtcccatgttcttctgtgtgccaagtcatgtgcccttcactttgtgtatcttttcatttgacaaagcatccacctagctagatcatttcatcttaacacaagcaagacatggactgagagaagacataaacaggctgccatttatgaagcacctactgtgtgccaggctctgacaccaagggggctggagggaagtttggagtagagttcctgccaaggagtagcctggtggggctaggaacccactattttttgaaggcctattatatgccagactgcttgaagcactttacataggtggtacagatttttgccttacttaaaaattctaggctgggtttggtggctcaggtctataatcccagcactttggaaggctgaagtgggaggattgcttgaggccaggagttcaagaccaggctaggcaaaagagtgagaccccatctctactaaaaattttaaaaagtagctgggcatggtggtgcttgcctgtagtcccagctactcaggaggctgaggtgagaggattccttgagcccaggaatttgaggctgctatgagttatgaccatgccactgcactccagaatttctacaagcaacacatgagtacatattcattgtaacaacaacaaatcagatgaaatgaaattcctgtttcctcccctcagtccccttccttggagtgccttacactgttgacagtttggtgtgcatccttgcagacctttctccatatgtttacaaacatgtatatatctgtagatttaagagtcctgttttgtggcgtttcttccttaattcatttcttattaatgggataacattgtagacattgttctgcaacttgtttttttgtttggcttggtttggtttggtttccacttaacaacatgtcttggagatgcttccctcttcccctcacaatagacagatgggcaagacccggatatgggaagtgggtacacgcccagacacacaaaggcccctcacacacagatactcagtcagctggagacacagcccgagctgggctggcctggcctcctgccccattctcactgacctcatgcatcatctcctgtgcccggcagggtgagctggagcggcagctgcttcaggccaaccccatcctagaggcctttggcaatgccaagacagtgaagaatgacaactcctcccgattcgtgagtgccaggggtgggcagtgctggctgtgtcagggatacaggagctgggaacctcagggtgggcttcagggggaaagacacgtggatctgttgagggaggaggggctgggggtctggactcttgagtctgagggaggaggggctgggggcctggacccctgggtctgagggaggaggggctgggggcctggactcttgagtctgagggaggaggggctgggggcctgaacctctgggtctgagggaggaggggctggggccctggattcttgagtctgagggaggaggggctggggacctggactcttgagtctgggggaggaggggctgggggcctggacccctgggtctgagggaggaggggctgggagccccagacccctgggtctgagggaggaggggctgggggcctggacttttgagtctgagggaggaggggctggggacctggacccctgggtctgagggaggaggggctgggggcctggacttttgagtctgagggaggaggggctgggggcctgaacctctgggtctgagggaggaggggctggggccctggattcttgagtctgagggaggaggggctggggacctggactcttgagtctgggggaggaggggctgggggcctggacccctgggtctgagggaggaggggctgggagccccagacccctgggtctgagggaggaggggctgggggcctggacttttgagtctgagggaggaggggctgggggcctggacccctgggtctgagggaggaggggctgggggcctggacttttgagtctgagggaggaggggctggtggcctggacccctgggtctgaaggaggaggggctgggggcccagatccctgggtctgaaggaggaggggctggggccctggactcttgagtctgagggatgagggagtgcaggcccggatccctgggtctgagggaggaggggctggaggctgcgtgcctagttccaagggaggagcagctggggaccagggggctggggaaagaagtccaaggggcccggaccttgaattcccaaggagccccccgatggggactcaccacaggatggggttcaggtagagggagcaaggaagtgggggggcagccgcagctctgggagcagtgggtgtggggtttgggctgttgttcacgtgtgagtggggaaggggaccctctgctgaagcccacccactttggtctctcccagggcaaattcatccgcatcaactttgatgttgccgggtacatcgtgggcgccaacattgagacctgtatcctctcacagcccatgggggtggcagccaaggggggcagcctttcagacagcactgagtatggaaagcacctcccactgcagggaccccttacctgctactcagatgggacctgatgctcaggcggcatctgcatggggaggggagggtgggacttctggtgtgtatgaggccagcacagcctcgctatggggtggtgggttggggtccacccagttcagccataaggggagtcccagcacttagcctgcagtggcactcatggtgacccatgacagtgaaatgacatagagcagtataagcaaagggaaaaggcacgtggggccaagtccccagggaccaggcacaagctcctagaaccctctccagcagaggcacacaggacaccaggtgcgacaacacttatgaaatgctgtcccggggaagcacagagagactcactaccagggttttcactggtggctggccacatccccgcctgcaccccccgtcccccgcccttagtatgaaccaaaattccacactcccgggaggaaagcaggtgatcagtgtaaaccacagtgtttgcacaaaccctttaggtctagcgaacccctcatcctgttagaggatgctggaaccctcccgaaatccaggtgcccagacgctagccaggggcccacctggccagcaggcctttccaggggagcatctcaggacggctgttttctgctcagatggcatatgggcgtttaaaggaaattaaacaataaaacacaggcactctgggagtgcagaaattaagagaatgggccaagaaatcgtaccaacctgggttcaaatcccagttctgccactttgagactctggggacttgggtacgtgacttggcctttccctgcctcagtttctccctctgtagaaggagaaggaacatagaacctacccaagaggggtttggaggattttggagttaaatgcttggccacagcacctgctacatagcaggcactcaagaacaagctattattagcaattaatgattaaattagtggccaggcacggtggctcatgcttgtaatcccagcactttgggaggccaaggccggtggatcatttgaagccaggagtttgagaccagccaggccaacatggtgaaaccctgtctctaataaaaatacaaaaaaattagccgggcgtggtggcgcatgcttgtagtcccagctactatggaggctgaggcaggagaattgcttgaacctgggaggcagaggttgcagtgagccgagatcacgccactgcactccaacctgggtgacagagcgagactctgtgtcaaaaaaaaaaaaaaggttaaattagcaatatctgtatcaatgctaatattattgactaatattgattgataattactaatcaataacattaacaactgctaataagccacatccccatcccagaggcatctgataagctcacgctcttccataatcagtggggaggggtttctcctaagtctgctcagggcatgaagcagccagccggcccgttggttctgctgccttgtgggagatgcttcctgggctgtcaccaccccaagtccccagcagcaccgcagcccctgctcctgccgttttctgctcatggctgctccttcctccaggtcctcttgcccttggctcccacctctccatggtacctgcatatccaggttcttggagctcatggctcttcctgccaaactgtcctggcacttgtgtgtctctgcttatattcatatttgccttctctgtccgcttccacctgctcactttctcctgtccacgctccccatgcagtgtggctgcccctcctgggcacagctgtggtcccggctgtctcaggcaccagtggattgatgctcatgaatcaggtcccgcccccaggccaatcgtatgagtcttgggatggcctgccgggtaaggagcaccaccctgtgtggctgacccctcggcactagcatcagtgccatcgtgaccagcttttctggagtgctgactgtgtgcccaccgccacctcgagagtccccatgatatctcagttcctcctctctgcaaccctgcgaggtggctgctgctatcacccccgcttcacagaggaggaaaccgaagctcagggctgttgtcccccagggttcgacagcctgcgtgtgctccctgccttccagctttccttgtgggagcccctccacctgtttctccccatctaaccaagcaggttacaccccagggcttctgggaaatggacctcaggtttgcagctgatcttggtccaaatatgtatttggtggtgcatgagtgtggtggtgcatgagggacacagaggggttaagcaaagtgtatggtgttttggtgttttgttttactctaagatgttttggctgggcgcagtggctcatgcctgtaatcccagcactttgggaggctaaggctggaggatcacttgagctcaggaattcgaggccagtcagacctcctctctactaaaataaagaaaatttaaaaattagccaggtgtggttgtgcacacctgtagtcccagctacttgaggctgaggtgggagtattgcttgagctggggaggcggaggttacagtgagctgtgattgtgctgctgtgctccagctgaggcaacagagccagaccctgtctaaaaaaacaaaacaaaacaaaacaaaacaaacaaaagtcttgccaccttttaatatgtaagtttgacacgtgactttcttgggagggagagcatgcagagtgacagtctagttgaaggtgggagctgattatctgcatggggaagctgaggctgggagagtactaatggcaggagacattctcacctgcgggtaactttgaaccaggcattgttcagggtgcttcatgcacaataagtcatttatcttcacagcaactcatccagggtcgatgaggtttctttgttttgtttttgtgacagagtctcactctgtcgcccaggctggagtgcagtggcgcaatctcggctcactgcaacctcctcctcccgggttcaagcgattctcctgcctcagcctcccaagcagctgagattacaggcacccgcgatcacacctataatttttgtatttttagtagagatgggattttgccatgttggccaggctggtcttgaactcctgacctcaggtgatccgcctgccttggctttccaaagtgttgggattacaggcgtgagccactgcgcccacagggttgatgagttttttagagacagagcaagaccctgtctctaaaaagagagagagagagagaggaaggtctcctaaaggtgttattttcaagccccttgaacaggtagatgaggaaactgaggcacaagtgcttaagtgacatgagcacggctgctcttccagttagtggcaaagtcaccagcctgggctgtgagcgactccactacaccacaggagagaagggggcagcgtgggcagggcaggctcctgtagtggcctggcagcgtcggggccgtcccttcccctctagcaccttgactcgctgtgtccagacctgctggagaagtcgcgggccatccgccaggccaaggacgagtgcagcttccacatcttctaccagctgctggggggcgctggagagcagctcaaaggtcagtgccgccccgtcctaccctgctcacccgggagagggtgggcaccatgtctctcgggggccccttctggggaggaagcaagagtggggggctctaatatccgtcaaacaccgacttcgcatgaggctcccgcagcccctgctctcgctgcgtagtggcgtctgtcgcacggtgggttctgctgcgctctggttccagctctgtcccgggtctggctcgcgcccgctgtcacggccacgcagcccccgccgcctggtggctcctgctcacgctcgcttccgaagctccgtggcttctctctcgcgcggcttctcctcactccggcgggtgactccggctttgctgaggctcctcctggttcctgacgacgctggtttgtgttgcttctcggctcgtgctgcctcgtgctcccctctgctctggctcctaggccacggctcttgccggagtcctcctgtccctgctccctgttcctcctgccctctggctgcccaagcgcccttggctcctgtttgcagtggctggcactgccctgtagctccctctgctcctggctccttcctcctggtggctcaggccgcttcctggctcctgcggccacatagcccctcctcatccaggttcccactcactgtggcctttgagaccgcatgtccttgggcgccggcccctgccatcccatggcctgtgctgacttgggcctgcagccccactgcttctgccaaccagtggcccctgcctgctctgggcacttctagagactcaaaagtccctgcggagggagcaaagaggagtggtatacactgcgtggggactcatgcctgcaatcccagtactttgggagggtgaggcaggaggattgcttgagcccaggaatttgagtccagcctgggcagcatagtgagacccccatctctgtaaataataacaataataataagctgggcatggtggcacacagctgtagtcccagctatgtgggaggctgaggtgggaggattgcttgagcccaggagtttgaggctgtggtgagccatgattgcatcactgcactgcagcctgggcaacagagcaagaccctgtctctaaaaaattaaaaaaaaaaaatagagacagagtggtggtctcataggtgctaaacgcccactccacccccgacccttcccaccacacttgtgagtaaaggcccccacccacttgacagtgaggatatggcatgtcctgggattgccaccgatgaatccaggatgagtctgactgcacagcccacctttgaccttgaccccactcattgtccctgcagccgacctcctcctcgagccctgctcccactaccggttcctgaccaacgggccgtcatcctctcccggccaggagcgggaactcttccaggagacgctggagtcgctgcgggtcctgggattcagccacgaggaaatcatctgtgagtgagccccgtggaggccaggggtaggggggaaccccacggagagctggggacctggccattcatgccccgatctctttgagcaagtgtttattgagcacctactgggtgcaggcaccggggccagagcagggaatgaggctcacagacatctctgccttgaggaagctgacaaaatgagagcccccaaccaagtcaataaggaatcacatggcctgttagtagactatgagtgcagctgggcgcagtggctcatgcctgtaatcccagcactttgggagtcccaggcaggtggatcatttgaggtcaggagttcaagaccagcctggccaatatggtgaaacaccgtttctactgaaaatacaaaaaagttagccaggcgtggtggtgggcacctgtaatcccagctactcaggaggcttaggcaggagaatagtttgaacccaggaggcggaggttgcagtgagctgagatcgcaccactgcactgcagcctggtcaacagagcgagactctgtctcaaaaaaaaaaaaaaaaaaaaaaacaaaaagaccatgagtgccatggagaaagatgggggagggaggggcacagctttaagcaggggctcaggggagggtggactgagatggggatgtttgaacgaagtcctgaggaagtgagggaatgagcactggagatgtgggggaagagcattcctggcagagggaacagcctgtgcaaaggccctgaggcaggaaaggggtggcatatttgagggattgacacttctggtggtggagctgcagaggggtggggagtctcaaacgccagcctaggaggttgggactttgtcctggggtgctggggagctgtgggagggctgggagcaggggttggacaaattcagctctgggagcaagaagaccccttgggggccgtgtgagagacacactggagtgggtggtgctgagaccagaaggaggctgctgaggctctagggaaggctcaggacgctgtcccagggctgctcaggttggcccaggctgcgcggcactggttatttggtgttaaatgctcagctcatcacccccgtgtcagggtgctgtgcccacccccacttttttttttcttttgagagggagtctcactctgttacccaggctggaatgcagtggtgtgatctcagcccactgcaacctctgcctcctgtgttcaagtaattctcctgcctcagcctcccgagtaactgggattacaggcgcccgccacctcgcctggataatttttgtatttttagtagacatggggtttcaccatgttggccaggctggtctcgaacccctgacatcaggtgatccaccctcctcggcctctcaaagtgctgggattccaggcgtgagccgctgcgcccagcctgtgcccccacttttttcaccaaacagcatgttttgacagcagctctgtctcagtgctgcattagtttgcttaggctaacaaagtaccacaaacctagtgcctaaaacaacagaaattgattgtcttgtggttctggaggccagacgcccgggatcgtggtgttagtgagggtggttcatcccgggagaatcggctgcaggtctctccctaggctcctggtggttttctggcaatcttcggcgttccctggctcatagtcgcatcacccgatctctgcttttgtgttcacatggcggctccctgtgtgtgcatctgtgtccaaaattccccctcccccctccccccgacccccccgccccaacctttttgtttttttgagacggagtcttgctggagtgcaagtggtgcaatctcggctcactgcaacctccacctcccgggttcaagcgattctcctgcctcagcctcccaagtagttgggatcacaggcgtgtgtgccaccacacccggctaatttttttgtacttttagtagagacagggtttcactaagttggccaggctggtctcgaactgctgacttcaagtgatcctcccgcctccgcctcccaaagtgctgggattacaggcatgagccaccgcacctggcctcctaccctacactggtatgattttatcttaactcgttacatccgtaatgaccctgtttccaatactgtcacattctgaggtcctggggtttagatccccaacatgctttttaggagggggtggtgtagacatgattcaacccgtaacaagtacgtaggtggacctccgccttttcagaggctgcgtaatgtttcattgtttgcgtgaactatgattcttttaaccaagccctccaaagaaagacctttaggtgtttctgggctgagccagggccgcctctgggtctgattgtcttctggtctctggcgctgtgggaggccccaggagctattgttggctccagggccggattggaagtgctggaaatggagcgtagcttggctgtctacccaggctgcaaacagccgggcctcttgtggcctattgacacagggtcttgggcctctcccacccccaccccgccgcatttcccaaccagggttgcataattccccagcctgcatgactccgcagctgggcagctggcacacaaattcagactgtggctgcaatggggacctgggcctcccagcctgtcctcttaggtcctgcctggcctcttgtcaccatgagctcatgtgaccctcctggcagctgccctgctgtgtggcaggcgcaggcagcagctctgatttttggaattcagaaataaaaactttgcagcaacctatgcatgtagtaacataaactgaatgtggctaaaggttgtactgacaaaaccaagccttcccactcttccctggccctagtttcccactgttgagcttcttgtatctccttccagaaatattttaagaatataagaaaagacacatattatttgtctataggaggaggcattctctaaccccacagctgatgttcagctgtcaacatcactgtggtgataaaaaaaatgtgaagcaatttctctattggttcaaaagttccggccaagtgcagtggctcacgcctgtaatcccaacagtttgggaggccgactgaggtcaggagttcgagaccagcctggccaacatggtgaaaccccgtctctactaaaaatacaaaaattagccagacatggtggtgggcgcctgtagtcccagctactcaggaggctgaggctagagaattgcttgaacctgggaggcagaggttgcagtgagccaagatctcaccactgcactccagcttggagcagagcgagactccatccaaaaaaaaaaaaaaaagttcctggatgttggttgctccagctggccccccagctccctacccttccactagagacccccctggaccctggcccagcactctggcctaggttagtctgggccaggcagtgctagagttaaatactcagcttgtcattggctcactcctgtaatcctaacactttgggaggccgaggtgggagaatcacttgaggccaggagtttgagaccagcctgggcaatatggtgagaccctgtctctactaaaaattaaaaaaaaaaaaaattaaccaggtgtggtggtgcaaatctgtagtcccagctacttgggaggctgaggtgggaggattaagtccaggagtaggagactacagtgagctatgattgcaccactgtactccaggctggtgatagaatgagaccccatctcaaaacaccccaaaacaaagaaacaaattactcagctcatcattcccatggaaggatgctctggaccccctctccactgccctttcctacagactggtatattttggccatagttgtggttcaaaatagatggacctcattcctttttgcagctgcgtaaggttttattgtttaaataaactatgattctttcagccaatcccttgcagatagagccttaggttgtttccattccattactattggaacaattaaaaaaaaaaatgctaagccagcgcagtggctcacgcctgtaatcccagcactttcagaggccaaagcaggcagcttgcttgagctcaggagtttgagaccagcctgggcaacatgatgcaacctcgtctttacaaaaaacacaaaaaattacctgggcgtggtggtgtgcgcctttactcccagctatttggggggctgaggtgggaggatctcttgagcccgggaggtggaggctgcagtgaaccgagatcatgccactgcactccagcctgggcgacaaagtgagactctgggtcaaaaagaaacaagctaccgtgaatatccttgtaaacaggttcttgtgctcttgtggaaacagacctgtaggttcaattcttagaaacgaaatgccagctgggcgcggtggctcacacctgtaatcccagcactttgggaggccgaggcaggcggatcatgaggtcagaagtttgagaccagtctgaccaacatggtgaaaccctgtctctactaaaaatacaaaaattagctgggcgtggtggcacatgcctgtaatcccagctactcgggaggttgaggcaggagaatcgcttgaacccgggaggcggaggttgcagtgagccaagattaagccactgcactccagcctgggtgtcagagcaagactccatctcaaaaaaaaagaaaaaaaagaaatgaaatgccatttccaaggagacttgtgattcttgtttgcgttcagcattaaaaaaatcgaacagctttaagatataattcacgtcacaccattcacctatttaaactgtgcaattccatagcattttgtgtattcatagagttgtgcacctatcatacagtcacttttagaacattttcagtagcccaagaagataacgcataccctttagctgtccccccaggccctgtccacagcctctggcaaccactcttctgctttcggtctctatggacttgcgtattctggacatttcatagcagtgaaatcatgccgtatatgatcctttgtgactggctgctttctcttggcatcattttcaagtttcatccacattgtagcatgcagtaggtttccttcctttttattgctgaataatttttattgttatcttcttatcatggaaaatttcaaacatgtatgcaaacagagtgcagaatgtaatgaatgccccaccaccaccagctggcagctgtcaccagctccatcaatgatgaaccggtgacctcttgtgtttcatctctccccaacctccctaccccaactcaggtgtgaacatttttttttttttttgagacagagtctcgttctgtcacctggggttggagtgcagtggcacgatctcgactcactgcaacttccacctcccgggttcaaacaattctcctacctcagcctcctgagtagctgggattacaggcatgtgccaccacacccgctaactttttttgtatttttagtagaggcagggtttcaccgtgttggccaggctggtctcgaactcctgacctcaagtgatccacccgcctccgcctcccaaaatgctgggattacaggcgtgagccaccgcacccggccatgagcattttttaaattgcagagaatctacctcgtcgctgtccacagggtggcgctagtttccagttcctccagcatatacctggagcacctgtgtccccacctgcacccagcaacgatggctggagcttttttgtctttgctgatgtggcagatgaatgagctctcattacagtttcattctgtgttttgcttacaaggagtggagttagtcaccttttcacagactttttttgacaagagacagagggtcagggaggtggggtgtcctgtcctaggactcaccccaattcaagaggaggaggcaaagccatggtggaaacgtctgaccccaaagccagcccatgatccagagagagaggtggacacctcagtgtcacccacagggagcccaaggcagaaagcatttggggccaatcaaggcagggtgtctgtccatctccttccccattttacatctctgcctgccaccccttggcaccataaatgccatgctgagaggttgagcaggtagcctgggacacagggaggcatgccagcctctcacatgaggcatccgcaggctgggcttgctagtgatgggcgagtctgatgtcagcaacaagagctgactgccaggtcctcagggcatcagatgcgccctggggcctggcacaaacacagcttcctaagccaactgcaagaggccattttaaaggccattgatggaagccaggtctggacggggtctaagctgatgttaaggaatgatcattaagtttgctgggccagatgcactgtgggtctgtaaggatgtgtccttctttatttatcttttttattttttattttttttgagatggagtctagcgctctgttgcccaggctggagcagagtgcggtggtgtgatctcagcttactccaacctccacctccctggttcaagcaattctcccatttcagcctcccgagcagctgagattataggcgctcgccaccacacccagcttatattttgcatttttggtagagtcggggttcaccatgttggccaggctggtctcgaactcctgacctcaagtgatccccttgccttggcctcccaaagtgctgggattacaggtgtgagccaccacgactggcctaggatccttcatttaatcacatctgcaaagtcccttttgccatggaaggtcacattcacaggtcccagggattaggttatgggtatctttggggtctgttattcatcctcccacctcctctgaaaacatcagcatgtatttcctacgaacattcctttatacaaccacagaccagcagtgtcaccaggaaatcgagttcagcacagcactgttatccagtccacagaccttaggccagttgtcccccaacctccaaaaaaaaacaaaaaaaattctctcttgcgcatgatggagtctcactctgtcccccaggctggagtacagtggcgcgatctcagctcactgcaacctccgccccccagattcaagcaattctcctgcctcagcctcctgagtagctggaattacaggcatgcgccgccacacccagctgattttgtatttttagcagagacggggtttctccatgttggtcaggctggtctcgaactcctgacctcaggtgaaccgcctgcctcggcctcccgaagtgctgcgattacaggcgtgagccaccgtgcccagccctcttgctctctttttttcctggtcatccatctctttactctccttcagtctgaaactcttcctgagtctttctttatcattcatggttttgacacttgggaagattacagactggttgtttcatctgtatctgggtctgtttccctgcaattacattctagttacacgtttttggcgggagtattccagaagaaatgctgacctcccacccccactcacacacacctttttctttttcttctttttttgagacagtgtctcactctgtcacccaggttggagtgcagtggcccgatctccgctcactgcaagctccgcctccccggttcatgccattctcctgcctcagcctccagagtagctgggactacaggtgcctgccaccacgcctagctaattttttgtatttttagtagagacaaggtttcactgtgttagccaggatggtctcgatctcttgacctcgtgatctgcccgcctcagcctcccaaagtgctgggattacaggcgtgagccaccgcgcccggccacacacacctttttctaagccacctttgtgtagaagtacagtatacacaccaataaaaggagcacaggcccttggcatccagcctgggggagttttgggagggaacaccctgtatatccagcacccaggagccccccatgtcccttcccaccaccagcaccccctcaaggtaaccattattccgacttctaagagcatggagttgtgttgcctcttcttggatttggtacaaatagaatcacacggtgtgcagtttctcacctggcttctgtcactcagccgtgtgtttgtgacattcatccatgtccagtgagggaagggggctttggagaggccagttccacagacacattcactttgtaaacgttcctggagctggatgtctatagtatgtgtccttttctgtatgtgtgctgcgcatatgtatttacattcataaacctatgctacgccggcacggtggcttatgcctgtaatcccagcactttgggaggctgagttaggagaatcgcttgagccggggaatttgagaccaacttgggcaacatgccaagatcccatctggacaaaacatttttttaaattagctgggcatggtggtgagcatctgtagtccagctactcagaaggctgtggtgagaggatcgcttgagcccaggaagttgaggctgcagtaagctatgatcacaccacaccactgcactccagcctgggcaacagagcaagactctgtctctttaaaaaaaaatctatgctaaaatgaaaaaggaaaatggaagcacagaaattaaaagcactgcctcccaggccaggcacagtggctcatgcctgtaatcccaacactttgggaggccaagtgaggaggacttcttgaggccaggagttggagaccagcctgggcaacagaatgagatctcatctctattaaaaaaataaaataaaataaaaaaataaaaacagaaaaacaaacaaaaaaacccaaaaaaacaaccacagactgccctggtttgaatcccagctctgccagcctatgtgagctgggtgatcttgggtgagttgattgagtgcctcagttaccctatctgtaacatgggaagcatagaaggacctgccttgttcagtggttatgaagggtacctgaagtcatttgtaagtgtttggaacaggttgtggtatggaggaagtgaaaaataaatcaaggtccatttcagtgcacaaatggtacaaactgttctagaatgaatggttgaccaggcggctgaggggttgcactgacctatggccccaccatgaaagcatcagatgcagccaggcttggtgactcatgcctgtaatcccagcactttaggaggcccaggcgggcggatcacgaggtcaagagattgagaccatcctggccaacacgatgaaaccccgtctctactaaaaatacaaaaattagctgggcgtgttggcatgtgcctgtagtcccagctacttgggaggctgaggcgggagaatcacttgaacccaggaggcagaggttgaagtgagccaagattgtgccactgcactccagcctgatgacacagcaagactctatctcaaaagaaaaaaaaaagaaaaagcatcagatgcaaacacaaacacagcctcacctgctgtccccttgactcaaacaccacacacagctctgctgtcaggggagagtgttctgaaaaggtgatcaattttgattgagtcctgagcaaagcaaagaacagccttctctgggatttacacagtggctgtcctcctggaaaattcactgtatattaattttttttttttttgaggcagggtctctctctcattgcccaggcttgagtgcagtggtgcaatcatggctcactgcagcctcgactttccaggctcaggtgatcctcctacctcagcctcccgagtagctgggaccacaggcatccaccaccatggccacctaattttttgtatttttagtagagacaggttttcactatgttgcccaagctgatctcaaactcctggactcaaatgatcttcccgcctttgccctcccaaagtgctgggattacgggcgtgagcccgtaccaccaccaccacaccgcaccaagcctcactgtgtattaaaaccaagcacaaaacactgctgtatttatacgtaaaactgttgggaatttgttgcagataattacaaaccatgacttcatggacgcaaatgtccagggggccatttttcagaagccatgtgggctgtagaaaccgtccgcatccaagtggactgcctagtcctggtgacgtccagaaacacccgacccctccacaagttcctgagacatattctagggggcagcactacccacttccaatgcactttctagaactctgcacagcctactcgccaaatctatttgtaacccccaattcaaggtccatttctgtattagtcatgctgctgataaagacatacccaagactgggtaatttataaagtaaaagaggtttaacagactcacagttccacgtggctggggtggcctccacaatcatggcagaaggcaaaaggcacatcttacatggtggcaggcaagacagaatgagagccaagcaaaaggggtttccacttataaaacctcagatctcgtgagacttattcactaccacgagaacagtatgggggaaacagcccccaagattcagttacctcccactgggtccctcgcacaacacatgggaattatgggagctacaatttcaagatgagatttggctggggacacagccaaaccatatcaatttcgatccacaaatcgtgaaaactgttctacaatgaacagctgatgatgtggctgagggattgcattggtgcatagcatcaccatgaaatcagtactcctggtgtgttcgtggtcatttacggtcctgcgtagaatggaggaaaatttgagtcaccgagtgcacactcagctcacatcagacaggggtggtgttctgccttctggtttcagttctcatactgtacagtgtcctttcctaaatagtgccatgttagtcacaaatttgcactttttgctggtgattgcactgtctcaaatgtcccctgagcacagtgctgatgtgctgtctggcatccccaaacacaagaaggctgccatgtggctttggagaaatgataaaatacgtgtgtgagatcagcttcctccaggtgcgagttacggtgctgttggcctcgagttctgtgcgaatgagtcagtagtatattaaataaggtgtctctaaaacaaaatgcacataaaacaaggtgacgaggctgggtgcagtggctcacacctgtaatctcagcactttgggaggccgaggcgggtggatcatctgaggtcaggaattcaagaccagcctggccaacatggcgaaaccccatctctactaaaaatacaaaaattagccgggtgtggtggtgtgcaccagtaatcccagctacttgggagggtgaggcaggagaatcgcttgaagttgggaggtggaggttgcagtgagccgatatggcaccactgcactccagcctgggtgacaagaatgagactccgtctcaaaaaaaaaaacaaggtgacttattgatcggttggtgaaaatgtgaccagaggtggtggtacacacccgtggtctcagccactctgggggctgaggcaggaggatcacttgagcccaagaggtcaaggctgcagtgagctatgatcgtgccactgcatacctgcctgggcaacagagcaagaccccattcaaaataattttttaagaaagaacatgaccagtgcaagtcacaagaatcgactatactttatatttcctcccttttgcacatagatagcagtaagccacacacagcattgtttgtttgcctcctgtttttcactcattgtggtagaagtctttccatatcactgtagaccttcttcattcatttccctaagtccttttaaattctacttgcattgttttacaaaatacacaacgtaagcagacactgtttaagtatcatagcgatagggcaagcctcagatataataaactcaaccggaattcaccgatctgttcacatatttcaaggcctgcccagtgtcaaagatggattcttttttttttttttgagatggagtcttgctgtgttgctcaggctggtctcaaactcctgggctcaagtgatcctcccgcctcggcctcccagagtgctgggattacaggtgtgagctatcacgcccatcccacaagtagattttaagctgaggggtggtgatataatttgccttaagctttttaagttacatgtttaaggggccagttaagaccacacatcggggtccagagccacacgtgacctctgtccttgcgtccccagccatgctgcggatggtctcagcagttctccagtttggcaacattgccttgaagagagaacggaacaccgatcaagccaccatgcctgacaacacaggtactgcccccggcctgcctgcccacgacctccagcccccgcccaggtggtgcccagccctcctgcacccctgtcccacgtagagagcatcccccttccagccacacctgtctccaacccaggatcactctgatttcctgcattttttttttttttttttttttgagatggagtctcgctctgtcacccaggctggagtgcagtggcgtgatctcagctcactgcaagctccgcctcccgggttcacaccattctcctgcctcagcctcctgagtagctgggactacaggcgcccgccaccacgcccggctaattgtttgtatttttagtagagacggagtgtcaccgtgttaaccaggatggtctcgatctcatgacctcgtgatctgcccacctcggcctcccaaagtgctgggattacaggcctgagccaccgtgcctggccgatttcctgctttttgctgagtctttgccaaaataacatcaaccactcttttcctgattctaaaagcgtgagctctgctgaaagtgaaccgcaccagcacgacagtggggaacagcaggagcccatcctcccagaccccctctccccacagggagccaccattagcatttggcgtagcttctccagcctctgcactctgcagagacacacttctttttgcctttcaagaacagaattatagtcaatatcccttactttaaaccaaaatagaaatagctatgtctctttattattataaaataatacaagctggaagggggaaaaatctggcatgacagaaaagtagaaaggaagagagaaaattacccataatcacctgtaatcccagcactttgggaggccaaggcaggcagatcacttgaggccatgagttcgagaccagcctggccaacatgacaaaacttcttctctactaaaaatacaaaaattaactgggaatggtgatgggtgcctgtagtcccagctgctcaggaggctgaggcaggagaattgcttgaacccaggaggcggaggttgcagttgagccgagattgtgccgctgcactccagcctgggcaacggagcaagaatctgtctccaaaaaaaaaaaagaagaagaaagaaagaaaaagaagaagaaagaaagaaaaagaaaaagaaagacaattacccataatcatattcccagagataattgctgctcacattttgggatgtgtctctctgggctttgttctgtgtctgtatcactgtggatatagagtgtcacagaaatggaatcgtgcttcaccccctcttcccctggagacagcaagagctttctgtcctgattatgaaatccgatgggctcatttctgaaagctgcacagcacagaaaataggaggacaggatgtattaccccactatgctgctggtaacagcattacctgaggcacctgggggctctgtacataggcacccagcaggtgtgccgtgcacacacatttactcatttgttttacaaaactggagtcagaccctgcaaactgttttgaaacctgcttttttttcccctgaatgctttcgggataacttttcaggttattcacaagaaactctactgggatcccttccctccctccctccctccctccctccctccttccctccctccttccttccttcttttagatagaactgtactgggattccctcgctccctccctcccttcctcctgccctccctccttccttcttttagatagaactctactgggattccccccctccctccctccctcccttcctttcttccttccttccttccttccctccttccttccttccttccatctttcctcttttaaatgaagtctcgcccagactggagtgcagtggcaccatctcagctcactgcaacctctacctcctgggttcaagcgattctccctgcctcagcctcccaagtatctgggattacaggcacgcaccaccatgtcgggctaatttttgtatttttagtacagacggggtttcaccatgttggccaggttggtctcaaactcctgacctcaggtgatccgcccaccttggcctcccgaagggcctccctgggattacgggcgtgagccaccgtgccccgcctccagtgtagcttttagtgactgcagaacattctttcaaatgggccaggcacctgtaatcccagctactcaggagctgaggcaggagaatcacttgaaccagggaggcggaggttgtagtgagctgagattgcatcactgcactccagtctgggtgataagagccaaactctgtctcaaacaaaacaaaacaaaacaaacaaaaaaaccatcagaacattctttcaaatgaatgaagcccgacccatctaaccaattcccgcttcttgggcactgaggttgtttcctagctttctccgattataaacaacactgcgctgaacatccttgtggcacggtctttgctcacatgcagggttattttgccagtgctggttcctggaaaaaaaatagttgggcagagaatgtacacacttttgggactcgtaatgcctctcctgggaaaggcggggcccgtcttctgctcccccaacagtgtgggaaacggtaccctctcccttgctgggcagcaagcacctcttcccagtgctgatggaatcttggtgcctctcgccctcagctgcacagaagctctgccgcctcttgggactgggggtgacggatttctcccgagccttgctcacccctcgcatcaaagttggccgagactatgtgcagaaagcccagactaaggaacaggtaggcggggctggcggtgggcaggcacagaaagagccgcgcaccccggccctgggtctttaaacagtgtatgctgtttttcccaccactcaacagacttttgctgagtgcccgctccgttaccgatcctggtctaggtgccaggcgtaaaagcagtcatcgaaacaaataaccaggccctcagggacctcaagttatagtaaggaaatggataataaaagttcaacaggatgtgtctgggagtggtggctcacacctgtaatcccagcactttgggaggccaaggtgggaggattgcttgagcccgggagtttgaggctgcagcgagctgtaattgcgccactgcactccagcctgggtgacagactgagactctgtctctaaaaaaattaaaaaatttaataataatttaaaaaaacaggatgtaaatgcaacatggtatcctagaaaaacaaaaaacaaaaacccaggatgcttttagatggtgagagcacctgtgaaggggaggttttgttggtcaggaaagtcctctctaaggaagctctaaggatgaaacattcgagatgagacctagatggttcgaggcagacggaaccgcaagtgtaaaggccctgggggtggagcaggcttggggagttgggaacattaagcaggtcagtgaggccgggtgtgggggctcatgcctgtaatcccagctctttgggaggctgaggcggacagattgagctcaggagttcaagatcagcctgggcaacatggtgaatctccgtctctactaaaatacaaaaattagctgggtatgtggcacacgcctgtagtcccagctacttgggaggctgagacacgaggatcacttgaacctaggaggcagaggttgcagtgagctgagagcacgccactgcacttcagcctgggtgacagagcgagactctgtctcaaaaaaaaaaaaaaaaagaaaagaaaaaaagaaaattgaaggaggtcaggtcagtgaggctgaagagcaagggagagagggtgggtgaatccacagtcagaaatgtcagcaaggggcagatcatgcagggtcttaggggccacagtaaggaggtgagttttattcaaactacataggaggccattgaggttttaagccagggagtgacttgattcagtttgtctttcatagaaagatccccttggctgctgcatggagaattgggttcagggatgcaggtagaggcggggagacctaaggaggctgcatccagagtcttggcaatcgtgggagctcacaccatgagcagggagggtggagtggagcgaccacaggccagggagggtttcagaatccagcttttgggcagaggcctctgctggccccaggctgggcagtgaggtacctggatgaagaccccgtgggggagatgaggagtctgggagccacactgacccgggttcaatctcagctggggtactgttgttagttcccattttacagaggagaaaactgaggcacagagaggtttattcacatgcctgaaatcacacagcccctaagtggcagagctgggattcaaacccaagttgtccggctccagagtccacgctcttaaccgctgtgcggtagaaactgctttgagggggtgagggaaggattcaagggctaacacatccgagcccgtcatgtagtacctggtgcgcagtaggacttcaggaatgtctgcctgttgttcatggcattgttcttgatggtacttacactcaaggagctgggaggcgaccttaagggggacgagctgggggcccttccccggttcacccccgacgtctttcagtctgctgatgtgcaggctgcgcccttaccatgagccctgtcccacaggctgacttcgcgctggaggccctggccaaggccacctacgagcgcctcttccgctggctggttctgcgcctcaaccgggccttggaccgcagcccccgccaaggcgcctccttcctgggcatcctggacatcgcgggctttgagatcttccaggtccacccttgtgctgggagggggatgccaacttcctcactccggtcctggtcctttctgaagccctgggtctctccccttctccctggtctctgtccccctctctctctctgagtctctgttcccccctctctctggtctctgtccccctctctctgggtctctgtcccctgtctctgggtctctgtccccttctctctctgggtctctgtcccctgtctctgggtctctgtccccctctctctctgggtctctgtcctctctctctgcatctctgtcccctgtctctgggtctctgcctctctgtctctgggtctctgtcccctgtctctggctctgtcccctgtctctgggtctctgtccccctctctctgggtctctgtccccctctctctgggtctctgtcccctctcgatgcatctctgtcccctgtctctgggtctctgtcccctgtctctgggtctctgtccctctccatcctcccagctcacgtgtcctgcgtccctgcagctgaactccttcgagcagctctgcatcaactacaccaacgagaagctgcagcagctcttcaaccacaccatgttcgtgctggagcaggaggagtaccagcgtgagggcatcccctggaccttcctcgactttggcctcgacctgcagccctgcatcgacctcatcgagcggccggtgagccccaggcccctcccagcccacactcacggttcagatccgtctctcccagcatctgcgagaccagggtctagctcctcctctgctgggcctcaggatgccccatgggttctgtggggaaggtgacagcacctgcttcctcgatcttttgtgaccataggtgattagggcccagaatgtgcctgccacagggcccggctcaaatcaatcggttaatcagagctctcaccgtaactgttgttctcacgtttgttttttgtttgtttgttttgttttgttttgtttttttcttgagacggagtctcgctctatcgcccaggctggagtgcagcggcgcgatctctgcttactgcaagcttcgccccctgggttcacgccattctcctgcctcagcctcccgagtagctgggactacaggtgcccgccaccacgcccggctaattttttgtatttttagtagagtcgggggtttcactgtgttagccaggatggtctcgatctcctgacctcgtgatctacccgcctcggcctcccaaagtgctgggattacaggcgtgagccaccgtgcctggcatctcacgtttgtttttatgtccaagtgtgacttataagagctaaaaatcagcagccacctgagtgtccaatatgtggggatctgacttactctccccctgctgtcaatggccaggccaacccccctggactcctggccctgctggatgaggagtgctggttcccgaaggccacagacaagtcgtttgtggagaaggtagcccaggagcagggcggccaccccaagttccagcggccgaggcacctgcgggatcaggccgacttcagtgttctccactacgcgggcaaggtaggggctggggccggccttggggcatgtgggagtggggatcaagggatctccactggctacagatggggggagggtgcagagggaaaacagggtcctcctgaggtccagacaaacagagcaggggctaggagagcccagggaggagcaaggattctgtctgatgggatcaccaaaaacttcctcaaagaggtgatatttgcagtgggttttgagggatgggtaggagttcatcaggaggcgatctatgtgcattttatccacttattcagcagatatgtgcggggtgccatttgtgtgcccagctcggggccgagcaaagctggatacacagatcaaacatggtttctgtcctcacaaagatccctatctgggagggaggcaaatacagacgatcaggatataaggttaataggtctttcagtggaggcagctgagggtagtgtcagagcccagaagagaagtacctgggaaagcttcacagaagagaatatgctcaatctcaaatctcagtcaagggccggcaaacattttctgtaaagggtccgatagtaaatagtttcagctttgtgggccagacgatctctgtcacagctacacaattctgctgtggtcacacaaaaagagccacagataatacataagtatcttcaagcccccagggaaaaagaaaggaaaaacagactgagaaacagtttcgagggctctcttgcccccagaagggcccccatgagtttgactatgaagacataaatgaaggttctattcctatatatatatacacatatatatatacacacatatatatatacacacatatatatatacacactacacacacacacacacacacacacacacacacacacacacacacacacatatatatatgtatttttttttatttgagacagagtctccctctgttacccaggctggagtgcagtggcacgatctcggctcactgcaatctccgcctcctaggttcaagcaattcttctgcctcagcctccccagtagctgggattacaggcacctgccaccatgcctggctaatttttgtatttttagtagagacagggtttcaccatgttggccaggctgctctcgaactcctgacctcagttgatccacccgcataggcctcccaaagtgctgggattacaggtgtgagccaccgcgcccagccctattccagtgaaagtatttgcaaaaagaggtggcaggctggattttgcctgtgagccatagtttgctgacccctggttttgatgatgtggaccaggcagccccagaggatgggtgaagggtgggaagggctctccaggcagagggaacagcatagacaatggctgggaggcaggagattccatgtgttctgtgtctagccctcagtttcttccccagacatactccagaactccccctgtacccagccctctgctaggccgtgagtcagacctgggccctgccctcgggggaccgctgtctggtggggggcacatatgcagagaattgtagcggccaagatcgtgactctatggagccccacagcaaagccctgagtacccagaaggagccagtggtgtgaaacccacagagacagaaccccaggtggcaggaaccgcaggggtaaaaccccgaggtgggagtaagctcgcatgtttgaggaacagtgcggaggccagggtggctggagcggaatgaataggaagaaagtggtggtggtggaggtcacagaggtggcagggggcatagaggggaaggagagagaggggaccatgctggtggggtgcagttcagaatatggacacaaggtggcaccagtgctcgcttgtccatggtgagctccagacctgggagtctcagagcttctggaaggctccttaggaaatccagagaatgtctgagcctgcaagtcatcgccctcctctacctgacttcattcaggtcgactacaaggccaacgagtggctgatgaaaaacatggaccctctgaatgacaacgtcgcagccttgctccaccagagcacagaccggctgacggcagagatctggaaagacggtgaggacccacttcccccaccccggctctaggggtctgtgcggccattctccaaatccacagcgtgagcacctttgtttcagaggcggaggtctgaacctgagttttctgctcagacccagaatagccagtgtcacaaatagtatttcaaatcagtgatggatggatccatagattaattgattgactattgatttgattgataagccagcatccttctcaaggataaagcactccgccttaatcagaaacgtggcaaagatacccactaacactactgttaaacatcgtttttttagcaatactagcctatgcaatcagaccagaaaaagtatgaatatcgaacaggaagaagtaaacttattatttttagatggcctgtgttccctaaacaattaggagatttggctgggcatggtggctcacacctgtaatcccagcacttttgggaggccaaggtgggcggatcacttgaggtcaggagttcaagaccagcctggccaacatggtgaaaccctgtctctactaaaagtacaacaattagccagatgtcctggtgcatgcctgtagtctcagctactagggaggctgaggcaggagaatcgcttgaatctgggaggtagaggtttcagtgagccaagattgtgtcactgcaatccagcctgggtgacagtgtgagactctgtcccaaaaaaaaaaaaaaaattctactgagaaataatttataacaataagagaacacagaatgatgatcttttgcaggtcagtcaacttttaggctttgctttctttgttttcttacaaagttcccttcacgcccccagggaagaagaaagaaaaaacagactgagatacagttttggagggctttcctgcccccaaaaggcccccatgagtgtgactgtctttttggattgacacttctaggggtcataggcagagatgccaaatgccctgtggtaggactctgaccttttccaagccttttctgccactgcccctgcccccccatccttagaggaggtttgagaaatggttttagaaagctggcagaactggcatcctgttttttccaggttccaagtttctggcatttgtcagtttgccttaatcttttattgacatgaaaaggtagctgtagaaataccagtccatgcaatttggcaagaaaacaaaatgagcggccaggcgcggtggctcacgcctgtaatcccagcactttgggaggccaaggtggacgggtcacctgaggtcgggagtttgagaccagcctgaccaacatggagaaacctcatctctactaaaaatacaaaattagctgggcgtggtggcacatgcctgtaatcccagctactcggggggctgaggcaggggaatcgcttgaacccgggaggtggaggttgtggtgagccgagatcgtgccattgcactccagcctgggcaacaagagtgaaactctgtctcaaaaaaaaaaaaaaaggaaaaaaaaagaaaacaaaatgagcaaggtgagtggttcccaaaacacactcacagagcaaaacagcatggagggtcttgatcttgtgagctcatgctagaaagatagattttatttttatgtctcatatagtatttacacaaggagattggaaagcagagtttgatgttcaggaacagaaccagattatgctacgagaatcatctcccggctgaaaatctgctgcccttttaaaatatttgtgctgtcttcataaacacatgattctccacagtgagccctcatttgtcacactctgtgtgtgcctgactctcagagggttccaaaagaaaaagtggaagctgcaaaacctcctggctcagcctcccgagtagctggggagctgccataatgtcacttcctccataatcctcctaaacaaagctagtcacaaggtcttcccagattcaaggagctgcaagacacaggcaaagggtgtcaatacaggggaaagtggggaatcggggccatttttgcccaatctctgctagagctgctttgagcccagaattggatgcccagcatcctgacagcccagggaaaaacggaaatgagattagctctcctctgagaggcaaaaacaacaagtggcctgggagcatcaagttcattcttgagcttcctggcagccagagcaaaaagggcaacctactaaaacagacacaacctctagagggagagattttttattctttgcactgaattcttacagaggacattcgtccttttggccaacagtgtgtggatacaaagatgaacaggagttcagaagtttatggccaacattctggttttccatcttgctttgctctgtactgttgactaataaccctctcctctttttcttcctgccacctcctctccttcccctcttttcatgcatctctctccgccatctctctgccatctcccctccacccacccacacatctgtcctcactccccagaacatgggggcttccagcagttctctttccttggctccttcccaccgtcgcccccaggatctgcagagaggtgcagctctgctatttctccgccagggggtgggtgtctctgtgcatcgatgggtgaggcttgctggaggaggagggtggacctgttgggctggggacctggttttgaacatctgtcccctctcctcttactgtggaggtctctcactcttcctttccctccttgttggctcccttggaagtttccagactctgtagcagcagaaccccttcttctaactaaactgcatgtaaaagtacaaacaagcgtgatagtaccagctcgcgtttcttgagcacttactatgtgccgttcaccatgtgaaacccctttagaattatcaacaccccattacacaaatgaggaaactaaagcacagagaagttaagtaacttgctgaggtcacacagccagtaagtggcagagctgggatttgaacccaggacatcagattccagaactttagttcttatctgtgctatgaggacttaataaatgataattatcattttgaaaatgacagggagtacggggtaggggagacggttgaacctggggaagaaaataacatatttgagcccctgccatgacctggccctgccctaagcacagattatctagttgacggttgatggcgcttgaatgggatgagttttgcaggacatcagattctgccctagctgtgggttcctgaggaacctggcatgattcaacacatagaatttgggaccaggtgcattggctcacccctataatcccagcgctttgggaggccgaggtgagaggatcacttgaggacaagagtttgagattagcctgagcaacacaggaagaccccgtctctacaaaataaatttaaaaattggtgggcatggtggtgtgcgcctgtagtccaaactacttgggaggctgaggtaggaagatcacttgagcctaggaggttgaggctgcagtgagctgtgatcactccactgtactccagcctgggtgacagtgagactgtgtctcagaaaacaaacaaacaacagaattcgagacagtgccaatagaaggaatggatatttttcactacccaaagcagcaccgccaagcggcactagagaaaatagaatctttttgttgagacagagtctagctctgttgctcaggctggagtgcagtgacacaatcttggctcacggcaacctctgcctcccaggttcaagtaattctcctgcctcagccttccaagtagctgggattacaggcatgtgccaccacacctggcttaattttttgtatttttagtagagatggggtttcaccatgttggccaggctggcctcgaactcctgaccttaggtgatccacccgccttggcctcccaaagtgctgagattacaggcatgagccaccgcaccctgccaagaaaatagaacctctatgaaattaggctcttctggaaaaatggttaaaatagagacagtttgccctatttcaaatattgcatataatgcaagaatttattacatcttttaatatgtttcagattcctaaaatgcaactgcagtggttatgttatcactgttttctctctctatgcctcagtttccaaatctgtaaaatgggaatgattcttacaggcttataaagccattgatgtaaattgctttgagcaatgcctgccagagtatctatgctaggtaagcatttgctgttattgtcatcatttattgataaggaaaacagagatcatgtccttgaagagaagaagggtcaaagaccagagtttgagaggactcctactgtctgagttctaatctcggatcttcagtttctaagctgtgtgaccttaagcacattctcccactcttcagagcctcagtatgtccatctgtccaatgaagctgatatctaccttacaggctgtgtgaggtccttcatatgtaaagtgccagttgtgataaatgataagacccttgacctttggcccaggtccctaaaactgaccctgacctccttctctctctctctgcatctccatctgacagtggagggcatcgtggggctggaacaggtgagcagcctgggcgacggcccaccaggtggccgcccccgtcggggtatgttccggacagtgggacagctctacaaggagtccctgagccgcctcatggccacactcagcaacaccaaccccagttttgtccgctgcattgtccccaaccacgagaagagggtgagtgactcagcctggggaggaaggggtggctgtggctgtgggttaaggtttggcctctggacttggctggagccacatctgattcgaggaccctcaaattagctgtgtggctttgagcaaattgcttctattcctaggctcagggtccggttgggaaaattcatgcattcatatgacttaatgtattaagcatctactgtgctgggaacaggtactggggaggcattggagagaaaggcacagccaactcctgttctcagggagctcacagtctgatggggagcatagacattcatctaaccatccaaaatgaacgtccagttaaatctgtaggggtggtgagtatcacacagggcttgatctggtcagtgaagttagggaaggttccctgggggacgtgatgactgagccctgaaggatacgtgatattccaggcagagaagagtttgtacaaaggcccaatggtaggttggagcacgcgaggtacaagggatagaggaaggccatcagggctgggcttgttgcatgggtgtgacaagaccatggccagcctcactggccactgattttcatgttgagaaaatcagagaatgggccctacagagaagggtcaatgggaatggaaaacaacatgtttgccatgttgcccaggctgctctcgaactcctgagctcaagcgatccacccgccttggcctcccaaagtgctgggattacaggcgtgagccaccacgcccagcctgagatcccatattttatcaaatctaagccatgtattcctccccactagcgtctctgaagtcgagatgtagcttagtcaacggcctgtcagggtttaattaccagtctttttcctttcttggtggcatatttaacgacagcgtgtgccactggaatttttgtactgtttagatttttgccatttgtgcattactgttgaaaagagaaaaggcggcctggcacggtggctcatgcctgtaatcccagcactttgggaggctgaggtgggaggactgcttgagcccaggagttcaagaccagcctgggcaatggcgaaacgccgtctctactcaaaatacaaaaattagctgggcatagtggtgtgcacctataatcccagctactcaggaggctgaggcaggagaagctcttgaacctgggaggcggaggttgcagtgagctgagatcatgccattgcactccagcctgggcaacagagcaagactctgtctcaaaaaaaaaaaaaaaaaaaaaaacgaacaaacaaacaaacaaaaaccaaaaaaacatgatttaccagctttggacagacatcagcttcccaggaggccttttggcgactctcttgcgtgcaaattcagccccacccacatccctccctgcggatcttttctccttagcacttagtatttcttctttattagtgactgcttcacctagggtatttctagtttctcctactgaactctcagttccccagggcaggatttccccctggtttgagcattgctgtcttcccagggcctagaaccgttcctaggcacctagtaggtgctcagtaaattacatgtggaaacaggaaattgccaagcttgaccgtttggcgcccccgtgtggccgccgctgacccccgcgtgtccgtccgctctccccaggccgggaagctggagccacggctggtgctggaccagcttcgctgcaacggggtcctggagggcatccgcatctgtcgccagggcttccccaaccgcatcctcttccaggagttccggcagcggtgagctagagcgagggcccaggcccggcggaggggctgggtgggacccgggtctggaagccgacacacctgcattcaggtctccacccactcttgttccttctgcgctggggaagttgaggcagattactcactttgctgagcctcagtttactcgtctgtgtatgggagaacaatagcccacttgatgcactcctgagagaaagcacacagagtctatggggatctggggtacattgctgctgctgtttagggcagtaggccccaaactatgaacgtgaaatcactgcatggtgttacaaatctgcatgtctttaaaaatgaagtagaaggcggggcgcggtggctcacgcctgtaatcccagcactttgggaggccgaggcagacagatcacctgaggtcggaagttcgagaccagcctgaccaacgtggagaaaccccatctctactaaaaatacaaaattagccgggtgtggtagcacatgcctgtaatcccagctactcgggaggctgaggcaggagaatcacttgaaccgggaagggggaggttgcagtgagccgagattgcgccattgcactccagcctgggcaacaagagcaaaactctgtctcaaaaaaataaataagtaaataaagaagtagaataggacagaatagaaaataccaaggcctaatgagcaagtaatacagcaaatgtaacaaaaatgatgcttcacacaagctgtgtagagcagcaccgtcccttagaagtagaatgggaagccttgtacacaattgaacattttctaatagctacacttttacaagtgaaaaaaatgaaattaattttaacaagatattttactaaagccaatacatccaaaatactggccaatactggctgggcactgtggctcatgcctgtaaccccagcactttgggaggccgaggcgggtggatcacttcaggtcaggagttcaagacagcctggccatcatggagaaaccccatctctactaaaaatacaaaaattagctgggcatggtggcacatgcctgaatcccagctacctggtaggctgaggcaagagaatcgcttgaacctgggaggcggaggtcgcagtgaggcaagatctgaccactgcactccagcctgggcgacagagcgagactctgtctcaaaaaacaaacaaaacaaaaaactgaaacagtcgatcattgtcgatgttgctgtccttggtggtggcgtgaatgctcagatgtgagttttgtgactgtccttgttattgtcactgttgttcctgctgtgtgtcactctgagcccagtgcctggcccgcagcaggcactaggtgagcgtttgctgtaactctctcctccccacccctccctgctcattgcagatacgagatcctgacacccaatgccatccccaagggcttcatggatgggaagcaggcctgtgaaaagatggtgagtggggcagagcctggaatgcgtgtgtgcgtgtgtgtgtgtgcgtgcatgagtgtgcgtgcatgtgtgtgtgcatgcatatgtgtgcatgcgtgtgtgtgcaagtgtgtgtgcatgcacgtgtgtgcgtgtgtgtgtgcatgcatatgtgtgcatgcgtgtgtgtgcatgtgtgtgtgtgcatgcgtttgtgtgcaggggcccaggtggtcggggagtggggctgggatctccccttcattgaccttcctcattacctctccctatcaccgcccccacccccgcttcctcatcatcccctatcacccccctccccgtcaccccatcaccccctccccatcaccactcccccatcgccccctccctataactcttctcccctatcaccctcctccacatcaccccctcccccatcaccccctctccccaatcaccaccccctcccaatcactgcccctcctcaccacccccccatcatcccctgccccatcacccccttcctataactcccctcccctatcactcttcacatcaccccctcccctatcactctcctcatcaccccctccccatcacttctcccccatcacctccctcccccatcaccccctcccccattaccccctctccccaatcaccaccccttccctatcactccccctcctcgccaccccctcccccattactccccctcctcaccacccccactcccccatcaccccctctccgtcatcacccctctcccacccctcacagatccaggcgctggaactggaccccaacctctaccgcgtgggacagagcaagatcttcttccgggctggggtcctggcccagctggaagaggagcgagacctgaaggtcaccgacatcatcgtctccttccaggcagctgcccggggatacctggctcgcaggtgggcagccacgctgtctcccggggtcctgttggccgagactgggtcagggaggggttgaccagatggctctaggtgtcagggcctccaggatgggtgcagggctgaggagcaggtggatggaggtgccgggtgtccaggcttcttggttctgcagtccctgaggggccctgtgggcagggcaggccctgttcagagtaagactggcaacacagaggctggacttagccgcagggtgaccagctgtcctagtgggcctgggtctgggtttcccagggtgcaggacttccagtgctaaaacagagaaagcccggggcaacccaggtcaagctgtccgctctccctggccagtccctcgaggggctccagtctggaggtgagacttccatgggcatagagtcccagtcccgggtgagacctgctttgatgggggccatagaggtgcagcaaggaggccctgctgcaggccatgactcccccaggccacaccggacaagcaggtggatgaaggaaaatgggaaaggtgatcagggcaggagcaagcttgtgcaaagacccaacgatgcaagatcctggcacgcttcaggaatacagggagtttgcgggagagtctccttcctccttagaagtggctcagagaggccgggcacggtggctcacacctgtaatcccagcacattgggaggccaaggcgggcggatcacttgaggtcaggagttcgagacaagcctggccaacatggtgaaaccccatctctactaaaaatacaaaaattagccgtaatcccagctactcaggaggccaaggcaggagaatggcttgaactcgggaagcagagactgcagtgagccaagatcatgtcactgcactccagcctgggtggcagagtgagactctgtatcaaaaaaaaaaaaaaagctgaaagaatagagtggcaggaaaggatggcccaaacaccaggctgagtggggccttgtccagaggagctagggagccatggagggctgtgagcaggggaggggtgggtcagctctgggtgtagaaagactctctggaggcgtgttgggatgggctgataggagaggctggagaaggaggccaggcagaggatccaggcaagggagggtggggcctgaactgcggctggggctttgggactgggcagagagagtcgggagcagggggacgaacggccagaacacagtgagatctcaaagtaataagagtgcctgcacacagtaggcattttatgatggctgactaagtgaaaggagcttggcttggtcaggcatggtggcccacccctgtaatctcagcactttgggaggccgaggtgagtagatcacttgaggtggggagttggagagcagcccggccaacatggcaaaaccccatctctactaaaaatacaaaaattagccgagtgttgtggcacgcacctgtaatcctagctacttgggaggtgaggcaggagaattgcttgaacctgggaggtggaggttgcagtgagcccagatcatgccattgcactccagcctaggcaacagagcaagactctgtctcagaaaaacaaacaaacaaacaaagaaaataaataagaaaggagcttggctctcttgctaaggggatggcgcctggaggctcccactctgcccctcacccatttccccacccagggccttccagaagcgccagcagcagcagagcgccctgagggtgatgcagcggaactgcgcggcctacctcaagctgagacactggcagtggtggcggctgtttaccaaggtgagggcagcctggggaggtggccccagtagggagaggatagggccttggggcttggtctgcttgacaagtgacttcctccatgtgggcctcagttttctgcatcactaaaatggggccagtcggcccaggctttgctagctgggattctttagttagcaagcaacaagaaaaatctgactcgaaccaacatggatcaaagattcaagacaatgtgggctgcacctggatccaggggtccccaagacttctgttcaaggatttgctggaaggactcacagaacttagaaaagctgctgtactcacagctacagtttatcacaatacaaagatacagattgaaaacagcaaaggtgctgggtgctgtggctcacacctgtaatcccagcagtgtgagaggccgaggcgggcggatcacttgagatcaggagttcgagaccagcctggccaatatggggaaatcctgtctctactaaagatacaaaaattagctgggcatggtggcaggtgcctgtagtcccagctacttgggaggctgaggcaggagaatcactcaaacctaggaggtggaggttgcagtgagccaagatagtgtcactacatgtagcctgggcaatacagcaaaactctgtctcaaaaaaaaaaaaaaaaaaaaagagcaaaggttaaaaaaaaaaaaaaagtacataagtgtctcggagagaccaagcatgagcctacagctgctctctcccagtgaagttctgtggacaacacttagctgttcccagcaatgaagtatgataatatgcacggagtattgccaaccagggaagctcacctgagccttgatgtccagcgtttttcctggggctggtcacacaggcatggacaaggtcacacacatggtgacctcagttactcagtctccagcccctccagagtcaaactgatgccatgtggcccagggcccccaccacagatcccatcgttagcatagactatccagggtggcccaaggccccaggtaaaccaagacactcttatcagatgggacattctaaggacttagaggtaacctcccaggagcccatcaagggccagacttttcttaggaatgtgtggggtttggacaacccaggtctgctgagttaaccctttactgcacaagggtccaaacagtgacgtcagtatgcagtgttctgcgtctcccgcttggctttcctccgtgatgatcaccaacagaggctttccacacaggggccaccagcagatggagtcttgcccctaacaaccttggccagcctggtctctcttatcatagagctccagccagattcccaggtttcatgctcattggcccagctggagtcatgtgaccatcccagagccagttagtagggatcagatgagccaggctggcatcacatgcctacccaaagcagagggtgccaagccaggtcgccatgcaccatggagctcagggactaggtgttcccccagggggaaattggaaaggaatgagaaggatggaggttttgggggcagtaatgtaattctgaatacgatgtctgagagatcagcctgcattcccttggtcagtgttaactgagcacctactatgtgcccagaacttttatagaggctggggtaaatggtgattaaaaagagacaaggtcctgccaccatggagctcacagtctgggacaagagttgctgcactgcggcctgtgggccagatggctgtttttgcaaaagccctttcgttagcatggtgtctgcagctgcatctgagctacagcagctgagtggagtaggtaaacagccagaagctgaggttaggggctcacacctgtaatcccagcacttcgggaggccaaggcaggagcatcacttgagcccaagagttcaagaccagcctgggcaacaaagtgagaccctcatctctacaaaaaaaaaaaaaacaaaaacaaaaactgggtgtagtggtgcacacctgtagtcccagctacttgggacgaaggattgcttaagcccaggagtatgaggctacagtaagccatgatcgcatcactgcactacagcttgggtgacaagagtgagaccctgtcttgaaaaaataaatcaaaattaaaaactggccaggcacggaggcgtatgcctgtaatcccagcagtttgggaggctgaggcaggtggatcacttcaggtcaggggtttgagcccagcctggccaatatgatggaaccctgtcactactaaaaatacaaaaattagctggatgtggtgtcaggcacctgtaatcccagctactcaggaggctgaggcaggtgaatcgcttgaacttggaaggtgaaggttgcagtgagccaagatcgcaccactgcactccagcctgggtgacagagtgagactctgtctcaaaataaataaataaataaaaataaaaattaataataaataaaaaacagccagggtggcctgtaaaatctcaaatatttcctgcctggcccttgaagaaaaagtttgcctaccttaggtgttgggggttggggtcaagtaggatttgattggcatcatttgagaaatgtgaatgatacctgcgaaagatgcaaggagtcggggcagaaaaggagagaatagaagggatacagaattgggtggagaggaaaagaatcaagtagacttgtgtagaacggagtagaatatgattgaacagaaattatcagagcagatctcacttagcaagggcgacgaggttttgtgaaatttttgtttcagttctgtgtgtacctctgtcactgcagcctgaatcatgccatgtaaagctcatctctcactaaggaccttggactaacaggcttaagaaacactggcctttggccaggcatggtggctcatgcctatatcccaacactttgggaggctgaggtgggtggattacttgaggccgggagttggagaccagcctggccaacatagcgaaaccctctctactgaaagcacaaaaattagccggacgtggtggcatacgcctgtaatcccagctactcgggaggctgaggcaggagaatcgcttgaacctgggaggcagaggttgcagtgagccgagatcccaccactgcactccagcctgggcgagagagcaagactctgtcgaaaggaaggaaggaagggaggaaaaaaggaaggaaggaaggactgttccacagaatagcagcagccacagtacacagtgtctcttggatgtggaaggatcctttagccagagagattagatagatcaatagtgtatttagtggtgcttgcctgtacctgtcagtgttctaggcctgtgaccagggactgttgccaaggcggggacacacagctaataggtggaggagaagggatttgaacccagaaactcaaaccccactaagagtgtgaggtcttggcgcctgaagtcagccattccacccctttcacctccacctaggtgaagccactgctgcaggtgacgcggcaggatgaggtgctgcaggcacgggcccaggagctgcagaaagtgcaggagctacagcagcagagcgcccgcgaagttggggagctccagggccgagtggcacaggtgagggggcgggggcagggcgtgggggcgtgtcttcggggtggggctgtgtcgcatgggtggagccaggtgtgaggggcggggcttccggctgagccagcctgtgcccaggcagggctgtcgggaggatgggagcaaagctaaggtgtactgaggccgggcggggattggggctgtttagtttggttgagtcgtgacgtacagggagcagggccctgggggtgtagccagggtatgggccgggtaggggtggggtgggagagtcctgcagagccagaatggagctgggctgtaggatctgggggcaggggcctcagctgtggccgggctatggtatgcaggtggcgaacttataactgtttccagtatttcagctatcttaaaataatgctagaacatttgggaggctgacgcgggcagatcacctgaggtcaggagttcaagaccactctggccaacatggtgaaaccccgtctctactaaaaatgcaaaaattagccgggtgtgatggcgcacgcctgtaatcccagctactctgggaggtggaggttgcagtgagccgagatggcgccaccgcactccagcctggtcggcagagtgagactctgtctcaaaaataataataataataataataatgctagaacaaaccccttcttgagcatttttctgtttgccttttctgcattatttcctgtggttacattttaggtatgaaatgtattaaatgaaatgtgaggtagtagaaagacccctcgggggttatttgaaggatggactggaaggggaaaggctagagtctgggaggctggggaggaggctggagagagacaggtgagagaaggaaagacctgagcctgttggggctgtagggacagagaggaggggccagagagagcaggggtgcagactgatggctgtgagaggtgagggagggcatccccaggattctgacttagtgattagggggatgtgggctcatcctgagatggggacctgagggggaggaggtggggacaccgtgtcctcctgcccctcagtcctgccctggagaacttaaaggccaaagcaagttacaaggcagtaggcacccagtgcaggttgccctgggagcactgcctgctgaccactaacctcccacacactccccagctggaagaggagcgcgcccgcctggcagagcaattgcgagcagaggcagaactgtgtgcagaggccgaggagacgcgggggaggctggcagcccgcaagcaggagctggagctggtggtgtcagagctggaggctcgcgtgggcgaggaggaggagtgcagccgtcaaatgcaaaccgagaagaagaggctgcagcagcacatacaggtctggccccttgcatgcccaccaggccaccctccagacccctctgtctacaccatccacctttgcttctacaaaccgtgtgtctttgggccatgaatttgtagaaaactcagttctaagtgaatttgcaaaaagaatacatttttgattcagatcgcgggagaccttaaaatgtgtgagcttcacctatggatggatccaggcatccaagtgatatgttcagcttcaggcctggctggatccaggtgtctgagtgatttcctcagcttcaggcatggctggatgcaggaatccaagtgatatcctcagcttcaggcatggctggatccaggcgcctaagtgatgtcctcagcttcaggcatggctggatccaggcatccaagtgatatcctcagcttcaggcatggctggatccaggtgcccaagtgatgtccttagcttcaggcatggctggatccaggcattcaggcaatgttctcagtactccccctctctccgtctcctggctgcattcacgggcaggctgccctcatggttccccttcaaaatctagtgtgtattttacactacagcacatctcaattcagatgctaaattttcattggaaatacttgatctgtatttctatttcataatttctgcagtttataaaaactagattcacatggccaagttgttccaaacatgcttaaaagcttttcagtgattgggtgtctggttttaaatttaaaataaataaaattaaataagacagaaaatttagttcatcagtccacatcagccacatttcaaaagctcagtaatgtttttttgttttttgtttttttgagtcagagtcttgctctgtcgcccaggctggagtgcagtggcaccatctcagctcactgcaacctccgtctcccgggctcaagcaattctcctgcctcagcctctacagcagtatctgggattacaggtgtgtgccaccatgcccagctaatgtttttttatttttagtagagacagggtttcagtatgttggccaggctggtctcgaactcctgacctcaggtgatccgcccacctcagccttccaaggtgctgggattacaggcgtgagccaccatgcccggcccagtagtgttttaatcaacttctcttgatccctttggtgagggagggaccctaccctaggtttatggggatggctgagcacacagcactgggcaccagacaggtgaggggggccgacatcacaccacagacggccacatggatgttgccctcaagagcagagtgaacaagcaggggctgtgggaaacaggctttgtcacaacaacaggtggaggtgacccctgggtgccgtgggaaaatgtgtttggtttgtttcagtaattccatgggctggcagggagctggaatgtgcttctcagggataagcaggcactgtgcctggtccccaggataaggagggtccccagataaggctgggggaccttatctatgggagcagagggagtaggaggacttctgtttaggccatttgaggcccctgctacttttagcaaatgtcaaggcagcacataaaattgagtcttggctaggtgcagtggctcaatgtgtaatcccggcactttgggaggatctcttaagcccagaggttcaagaccagcctaggcaatgaagtgaaaccctttctctacaaaaacaaaaacacaaaaattagccaggcatggtgtcacacacctgtggtgttgtcacactacccacgaggcctgaggtgggaggatcacctgagcccaggaggtcaaggctgcagtgagctgtgatggcaccactgcactccagcctggatgacagagtgagacctttctcaaacagaataaaataggctgggcgcaatggctcactcctgtaatcccaatactttgggaggccgaggttggtggatcacctgaagttaggagttcaaggccagtctggccaacatggtgaaaccccatctctactaaaaatacaaaaaattagccaggtgtggtagcgggtgcctgtaatcccagctactcgagaggctgaggcaggaaagtcacttgaaccccgggaggtggagattgcagtgagccaagactgcaccattgcactccagcctgggcaacaagagcaaaactccgtctcaaaaaaaaaaaaaaaagaaaagaaaaaaatttaaacagaataaaataaaataaattcaaaaaataaaattgagtcttgatttccagtgtgcccaatgactgtcatgttggcagtacccatttctataatttgtgtatttactatgtttattttatttttaaaattatttattatttatttattttttttttgagacagagtctcactctgttgcccaggctggagtgcagtggcgcgatttcagctcactgcaagctctgcctcctgggttcacgccattctcctgcctcagcctccagagtagctgggactacaggcacccgccaccacgcccggctaattttttgtatttttagtagagatggggtttcaccgtgttagccaggatggtctcgatctgctgacctcgtgatccgcctgccttggcctcccaaagtcctgggattacaggcgtgagccactgcgcctgacctatttactatgtttatagtttataatctgtacccctaacccccacacaagaatgtgatttccacaaggataggtgttccttttttttttcagaggcaagatctcgctctgttacccagacttcagtgcagtggtgcggtcatctctcactgcagaaggacagtcacttttacccatcctcagtgcctagaaccgtgcctggcatacactaggcactcaataaatgcttgttgcgctaatgaatgaaatgggaaagccaataagagtttgatccttcccggcctcacccagggcatggacatctctgaaccacaagccgcggggatccgtgggccagccatccccgctcccatccttccccatcacactccatctattggcccagtatcctcactcctcctgccttcccaccccaggagctagaggcccaccttgaggctgaggagggtgcgcggcagaagctgcagctggagaaggtgacgacagaggcaaaaatgaagaaatttgaagaggacctgctgctcctggaagaccagaattccaagctgagcaaggttgggggcctgagggcagctgggaaagtggggatggggtgcattggtgggttaatgaatggtgaacttcacgccatgggggttaccacactgcggttctcaggtgtgcaccggtgggggtgggatgggtctatagccccaagggaatgggaaggagagggaggtgtagggggaggaaggtcagagaagggtgaaaaggagcagaaacatagatgagaacaacaccagaagctgcagatcaggtaagggctgctcctggcccaactcctcctgactgccccccatcccactccacccctcaggagcggaagctgctggaagatcgtctggccgagttctcatcccaggcagctgaggaggaggagaaggtcaagagcctcaataagctacggctcaaatatgaggccacaatcgcagacatggagggtgagctcccgcccagccagtaggggtctgtgtgtgctctaatgggggacctcaggcaagccccatgtgctacagggcctcagtggctgtgtctgctaaatgggataggaaggaaggctcagggcagattgagtgtcctcccagctcttgagttcttaatgcatctctaaatccaactctctttctctccttggtgtcttgggttgtcctcctttcttcccatctgactgtcccactgtctgtctgtttcagacatgtttttgtctccctgtcccttcctgttgacttagaatcagaaacagaagggaaggggcacagggaggaggcagggctgtagacacagggcagagagagtcagagggtggaggcatgggctgttggtggggatgaggaggagaggacagtgcgtctaggacaacattgtgggaagagtccctgagatagatggggaaggtgggaggaggagaaggcgttaagggaggtgctgagcttagccttatatgtgactggggacctgtggtctctgtgagagcggctgagtgtgcaggcctggagtcctcatgcacggcccccacccctgcctccagaccgcctacggaaggaggagaagggtcgccaggagctggagaagctgaagcggaggctggatggggagagctcagagctgcaggagcagatggtggagcagcaacagcgggcagaggagctgcgggcccagctgggccggaaggaggaggagctgcaggctgccctggccaggtgcagggtggggtgggcttggtggggtaagcagcatgggtgcacggccagccagcgtggggtgcccaagtcagaagctcctgggtacaaaccccagtggagccactcaccagccacagacaggccacatcccctccgagcctcagtgtccccttctgtcaaatgaagatagcaagagttccaggcccactaggttaagggaaaagtgaaacaagactctatgtgtctggtaacttgcataacagtgcacaatgggaacaagaaaatgctatttctaggccaagtacgatggctcacacctgtaatcccagtactttgggaggccaaggcaggtggatcacttgaggtcaggagtttgaaaccagcctggctaacatggcaaaaccctgtctctactaaaaatacaaaagttagctgggtgtggtggcgggcgcctgtaatcccagctactcaggagacttaagcacgagaattgcttgaacccaggaggcagaggttgcagtgagccgagatcacaccactgcactctagcctgggcaacagagcaagactatgtctcaaaaaaaaaaaaaaaaaaaaaaaaaagagctatttcttcctcttccctgcttggcctccccacaccaaacagcccagaatcagctgagatttgccaagtggcctatgttaggaatcataataattatatttacactcgttcacagtaattgagctcctactgtatgccaaatgtggtgcttagtgtttcaaatgctttttatgcactgtgcttcatgcaatctaagacccacttgattacaagtacagctccatttcggagatgttaaaatgtgaaaaactgtgcatcttagagttgatggaacatggggggtgtgtgtgtgtgtgtgtgtgtgtgtgtgtggttaagaacacgtctttgttttgttttgaaacggagtcttgccctgtttcccaggctggagtgcaatggtgtgatttcggctcactgcaacctctgcctcccaggttcaagcaattcttgtacttcagcctcccaagtagctgggattacaggtgcccgccaacaagctaattttcgtatttttagtagagacgggctttcaccatgttgcccaggctggtctggaactcccaacctcaggtgatccattcgctgaggttaggattataggcgtgaggcactgcacccggccgtgaacacacatctttgagtctgacttctgggttggaatcctggcttctcccctttctagtcatgtgacctcatgcaaatcacatcacctctctagcctcagttttttcatctataaaatggggtaattgtagacagtactcctaaggttagtgtgagggttaaagaagaaagtgctcctcagacacttcgcataccctgagccctcaataaatgccggatgtttctgttactactttattactcttgttaatttttttcttttttactgaggtgaaattcacataaaagtaaccattttttaaatgtacaattcagtagattttgcccattcacaatgctgtgtaaccatcacctctatctagttctagaacattttctcttttattgagctggagtcttgccctgtcgcccaggctggagtgcagtggcatgatcttgcctcactacatcctccgcctcttgggttcaagcaattctcctgcctcagcctcccgagtggctgggactacaggtgcccaccaccacacccagctaatttttgtatttttagcagagacggggtttcactatgttggccaggctggtctcaaactcctgacctcaggtgatccacctgccttggcctcccaaagtgctgggattacaggcatgagccactgtgctggcctccagaacttttttatcacccccaaaaggaaaccctgtatgtattaaccaatcacagccaggcacagtgactcacgccataatccagcactctgagagtaggaggcaggagggtcgcctgagcccaggaattcaagaccagcctgggcaatataatgagaccctgtctctacaaaaaacttttaaaaattagccaagcatggtggcatgtgcctgtagtctcagctacttagaggactgaggtgggaggatcctttgaacctgggaagtcgaggctgcagtgagctatgattgtgccactgcactctggtctaggtgacagaacgagaccctctctctcaaaaaaaaaaaaaaaaagaaagcagccactccccatccctccttctccccagcctggcagcctctgatccactttctgtctaaatagaatttgcctattctagatatttcatacaacatgtggccttttgtgctttagttatttttatcgccatctccccagcaaccctggtaaaggggagtgttcatcgtcatgtcctcccacaaatcaggaccctgcccttcttaagtcacttgttggagcagggggccaggagaggatactaagccaggcctgtgtggctcctgaaccattaacccccaggtcccagttggtgctgcccccagatccagcttctctttgcaatgacgctgtgtgaagggacaggaagccacatccctgtgagagctgtaaggagggactccgggccaacccagccactcacggacccggtaacctcggcaagtgctttctccacgctagacctcagtttcctcatttggcaggaacattaaatgaggtgatacaagtaaagcactggcatgaggcaggaacttactaagtgtctcctacgattactgttgctgtcattcccactttacagctaagaaaactgaggttcgaaatgagtcaggctgggcgaagtggctcactcctgcaatcccagcactttgtaaggccgaggtgggaggatgacttgaggccaggagttcgagaccagccctaggcaacataggcagaccttgtctctttggggaaaaaagattagccaggcatagtggaccgcacctgtggtctcagctacacgggatgctgtggtaggaggatcacttgagcccaggaatttgaggctgcagtgagccgtgactgcaccactgcactccagcatgggcagcagagcgagaccctgtctcagaaaacttaaattagtactgcagccaagtgcccagtggcagagagaggattctaacctgggactggccactcccaaagcccacatccagcctctcagtccccagaaatcattgcctcactctggcctgcccctgtatcaactccacggttcttgtcacccccagggcagaagacgagggtggggcccgggcccagctgctgaaatccctgcgggaggctcaagcagccctggccgaggcccaggaggacctggagtctgagcgtgtggccaggaccaaggcggagaagcagcgccgggacctgggcgaggagctggaggcgctgcggggcgagctggaggacacgctggactccaccaacgcacagcaggagctccggtgaggcccggtggcaggccgctgtcacagcctgtgcacatacagggctgggggaaggacttaggtacaaagtctctgtctatacagaggcttacttattgtacagttgttcatgaaccaccggctctaggtccggcctgggtcaagctggggacagagatgggtcagacccaggtgttacccttgggaacttccagtctcaggggaggcagattcaggcaaagacaatctcaacccagaacaaggggtgctttagcggagtaacacggggcactgtgggtgataagtgaagacccctaaaccaagtctatgggagatccaggaagactttcctgaggaagggccttttggaaaagggttttgaaaggtgaataggagttcacccttaaagccacactccttccacagcatcaccacccagatctcctgaggagcataacatgaggccctcatattttaaggaaacatgaaaaggagaaacaaccagctcccccaaagcccctgccttcctctgctctgaaattcccatcctctctcctttcccccaataaaggtccaagagggaacaggaggtgacggagctgaagaagactctggaggaggagactcgcatccacgaggcggcagtgcaggagctgaggcagcgccacggccaggccctgggggagctggcggagcagctggagcaggcccggagggtgggttggggcagggggacagggcaggggggccacggggagggcagggcaggacgcggggttggaggaggtaccgctggctggttctaggctagctcatctccctgggcccctttcctcacgcattcatgtgcatctttcattcagcaagcattaatggggtgtggactatgttccaggagcattgctggggaaccagccatgaacccaacaaccagcactgccttcccttgtggagctttccttttagtgagagaggcagagggtaaacaatataaacactttcagtttatattggggtgataagtgctatggggccataatgaacaggaaaaagggatcagaattctaaggcgggtgagtttttaagtagagaggctgtggaggtattctgcgagaaggtgacatcagggtaaaaaactgagggagtggccgggcatggtggctcttgcctgtaactttgggaggctgaggcaggcagatcacttgaggccaggagttcgagaccagcctgggcaacatggtgaaaccccatctctactaaaaatacaaaaactagctgggcgtggtggcacacacgcctatagtcccagctacttgagaggctgaggcaggagaatcacttgaacccaagaagcagaggttgaagtgagtcaagattgtaccattccactccagcctgggtgacagagcaagactctgtctcaaaaaacaaacaaacaaacaaaaatgggccagacgtggtggctcatggctgtaatcccagcactgtgggaggctgaggtgggtggatcacctgaggtcaggagttcaagaccagcctggccaacatggcaaaatcccatctctactaaaaacacaaaaaattagccgggcgtggtggtgggcgcctgtaatcctagctacttgggaggctgagacaggagaatcacttgaacctgggaggcggaggttgcagtgagcagagatcgtgcctttgcactccagcttgggcaacaagactgaagcactgtctcaaaaaaaaaaaaaaaattgggagtgaggggtgagctatttgttcactgggagaagtgtgttccaggcagagggaacagccagtgcaaaggccctgagatgggagtgtgcctggcctggtccaggaaaggcctcatagatctttgctcatctccttcccacaccagggcaaaggtgcatgggagaagacccggctggccctggaggccgaggtgtccgagctgcgggcagaactgagcagcctgcagactgcacgtcaggagggtgagcagcggaggcgccgcctggagttacagctgcaggaggtgcagggccgggctggtgatggggagagggcacgagcggaggctgctgagaagctgcagcgagcccaggtaagtggggtgggcagggcagaggtttctgctgtgtgaccttggtgacatgcctgccctctctgggcttctatttggtccatatcaaaccaattgtctcgtttggctcttccaacataatcatgtacaagtctgggcacagtggctcatgtctgtaattctagcacttgggaggccaaggcaggaggattgcttgagcccaggagttcgagaccagcctgggcaacatagtgagaccccatcttcagaaaaaaaaaaattttaattagccaggtatgctggcatgtgcctgtagtcccagctactcaggggactgaggaaggaggatcccttgagcctgggaggtcgaggctgcaatgagctgtgattgtgccactgcactctagcctgggcaacaaagtgagatcctgtctcaaaataataataataatacccagtactttgggaggccgaggcgggcagatcacctgaagtcagaagttcgagaccggcctcaccaacatggagaaaccctgtctctactaaaaaaaaaaaaaaaaaaacacaaaattagccgggcgtgatggcgcatgcctgtaatcccagctactcgagaggctgaggcaggagaatcacttgaacccgggaggcagaggttgtgatgagctgagaccgcgccattgcgttccagcctgggcagcgagagtgaaactccatctccaataataataataataattcactcatttaagatgtgcaattcaatggattttggtatattcacagagtggtatggccatcaccataatctaattttggaccattttcattatcccaaaaagaaaatcctataccctttagctatcatcccccacttctcccccaccccacccagggaaccactaatctcctttctgtctttactgatctcccattctggagatcttatataaatggaatcctactatatatgggtggcctttgtggctgccttcttttacttaacataacggtttcaagattcatctgtgttgcagctcgtagcataattccttttttattttttaatttttaaaacaccagctgggtgcagtggctcatgcctgtaatcccagcactttggcagcggaggcgggtgggtcacctgaggtcaggagttcaagaccagctgcctgaccaacatggtgaaacttcgtctctactaaaaatacaaaattagccgggtgtggtggcgcatgcctgtaatcctagctacttgggaggctaaggcaggagaatcacttgcacctgggaggcggaggttgcagtgagccgagattgcaccattgcgctctagcctgggcaacaagagtgaaactctgtctcaaaaaaaccccaaaaaacaacagcacgcaatagatccatatacctttctattgccgaataatgcccgttgtatggatattccacatttgtttatccattcgtttattgatggacattggggctgttcccgcctcttggcgatggtgagtaatgccactgagaacattccggtacgagtttctgcatagacctatgcgttcatttcttttgggtatgcacctaggagcgggattgttgggtcatgtgggaaccctatgtttaagcatctgtggatctgccagactgttttccacggcagctgtaacatttcacattcctgccagtgtggtagagagttgaggcagatggggtcactgggtggaagccacgattggagggcttcattcccgtcccttccctgcaggctgaactggagaatgtgtctggggcgctgaacgaggctgagtccaaaaccatccgtcttagcaaggagctgagcagcacagaagcccagctgcacgatgcccaggtgaccctgcctgcccttcggctccaccgtcaccctcccctccttgtcctcccagccacacctgacattgccgtctcctccatctacaggagctgctgcaggaggagaccagggcgaaattggccttggggtcccgggtgcgagccatggaggctgaggcagccgggctgcgtgagcagctggaggaggaggcagctgccagggaacgggcgggccgtgaactgcagactgcccaggcccaggtgagcagccctacgtaagaccttcagggaggcacagcccccctcactgctcctcctgggttccccagctcagggatggccatgctgcccaccttctcataggccagacccatgggtgcctttctcatctctgactcccccttaccccccacagcccatgcccagccctggctgtcctgacccctgactctcagcctcatcccttgtcccagctccagctcagccccagctccagtgccgtcctctcccatctagatcctcctcttggcctctgggcctccagcctctcccctaacagctcatcccctgcacagccccagaagcttctttctttacctggagctgaccctgtccctcctctgctcacagctctcccacgcctccccagtactcctagacaaagtccatgcctctcagtcaggcattgaggccctgcaatctctggtccttcctctgcctttagctgtattcatctctatctctactttcctattttatttgaaaaaaaccttttatttttccagacttagcattaggctcccctgtgggaagtttcctgacccgtcttctctttctcctctgtcccaactccagtcaccttgggctgggactgtctctgcccatgagtctccccaccagactgagagccccttcaaactagaatcccatcagagttagatccaggtctgtagcacagcctgatatagggcctgatgtatggtaggcgttgagaaatgcctattgaatgaatgagtgatggtacgtgcctgcagatatccttcaactggcagacttctatgcatacttcaagacccatctcaaatgctcctccttcaggaagtttctcctgaatgttctaaacagattctgggcacttcctgtggacctccatagctcccatactgctaccttaacccctatcaccctggctgtgactctgtgtctcccccagcagccgaggggctccccaggaaagactccaggtctgattcacctctgcatcttggagggagtaattttaattccctggaagaactagggctcatagtattcacaacttcacaccactcagaggcagaagagcccagcagaatgacccctttccctcttcaggcctcagtctcttcatcctggaaatggagcaccaccagcttacaccttggtcactcatggccgtgaccaccaaccaccctctctctcctcccctcagctttccgagtggcggcggcgccaggaggaggaggcaggggcactggaggcaggggaggaggcacggcgccgggcagcccgggaggccgaggccctgacccagcgcctggcagaaaagacagagaccgtggatcggctggagcggggccgccgccggctgcagcaggagctggacgacgccaccatggacctggagcagcagcggcagcttgtgagcaccctggagaagaagcagcgcaagtttgaccaggtggggcacctcagttcacccagccggggaatcagcaagtccatctacgcttcccatggtcgttgtgaggaaccagtaatccgtgctgtcacggctcaactaggcagttgtagtggaccaggaagcaagacccttctttgctctgggcctctgtaaaataggacatccctctgtcctgattcatgcctcttgccacagcataattcctcgtagcacccacttttactttcagagctgccctggtttttggatgacaaaatatacgaataccttcagtaccccagagattgcttatgagaattaaatcaaataactcatctcacttctgctgattcacggggtacctcaggcaagttgctttttccatctcagcttcagttcgcccatctggaaaatggcaataataccaagcatctggcagcctgaggatgaaataaaaatcacagaaccttagagagttcagatcaggcaatcctgaggttcagatcccaattcggcctcttgatggctgtgtggcttgggcaaattgctcaacctctctgtgctttattttattcatttagaaaatgcagtgtgaagctgggcactgtggctcatgcctgtaatcccagcactttgggaggccaaggcgggcggattgcctgagctcaggagttcacaaccagcatgggcaacacggtgaaaccccgtctctactaaaatacaaaaaaattagctgggcatggcggtgtgcgcctgtaatcctagctactcgggaggctgaggcaggagaatcacttgaactggaaaggcggaggttgcagtgagccaagatcgtgccactgcactccggcctgggtgatagagcaagactccatctcaaaaaaaaaataaaaaattaaaaaaaatttttttaaattgtcatttccctgtaggtggtgcagtatgtttttctagctgacttacgatttctctctttatgtttggttcttagtggtttgactgtgatatgcccagctgtgggttttttgtatttatcctgctttagattcactgtgcttcctgtagctgtgggttgatgtttttgatcaaatgtggaacatttcagccattatttcttcaaatatttttatctcccactctctctccttccccttcttcttggactccaaatacatatgatttgattgtaatactcttccacaggtcattgaagctttattatttttggcatcttctggaattttatataaattattttcacataaatctcttttgggatgggcttattttactcaaaataattttttttttttgagacagagtctcgctgtgtcaccaaggctagagtgcagtggcacgatctcagctcactgcaacctccacctctcaggttcaagcgattctcgtgcctcagcctcccaagtagctgggattacaggtgtgcaccaccatgcctggctaatttttgtgtttttaatagagacgaggtttcaccattttggcaaggctggtctcgaactcctggcttcaagtgatccacccacctcggcctcccgaagtgctgggattataggagtaagctaccgcacccagcctcaaaataattagtctgagatccatccatatttttgcatatcaataatgtattccatgtatcaataatgtatttttgctgctgaatattattcctgtggtatagatcagccacattttgatattcattaaccttttgatgaacatttgggtttttttccagtttttttctagttatggataaaaccttagtctttctcaaaggtggttttaattaacatttccctaatgaccagtgacgttgagcatcttttcatatgcttatttgccatccatatatcttatttgctgaagcttctgttcagatcttttgcctatttgttaattaatgttgtttgttttactattattgaattttgaaaattctttatgggccgggcacggtggctcatgcctggtaatcccagcactttgggaggccaaggcaggcagatcacctgaggttgggagtttgagaccagcctgaccaacatggagaaaccccgtctctactaaaaatacaaaattaggtaggcatggtggtgcatgcctgtaatcccagctacttgggaggctgaggcaggagaatcgcttgaatctgggaggcggaggttgtggtgagccgagatcatgccattgcactccagcctgggcaacaagagtgaaactctgtctcaaaaaaacaaaacaaaaaacaaaaaaaaaacaaaaaaaaagaaagaagttatttatgtattctaaatgcaagttctttatcagatatatgctttgcaaatatttttgtccagtctgtggcttttctttccattctgttagagtctttcaaagaacagaagtttttaattttgtccaatttatcaatttgttgttttatagattgtgcttttagtattgtatataagaaatttttgcctaactcaaggtcacaaaggttttatcctggtttttttcttgttttctttttgtttgtttgtttgttttgttttttgagacggagtcttgcactgttgcccgggctggagtgcagtggcatgatcttggcttactgcaacctctgcctcctggggtcaagcgattcctcctgtctcagcctaccaagtagctgggattacaggcacatgccgccacacccggctaatttttttatttttattttttttttattttttatttttagtaaagacagggtttcactatgttggccaggctagtctcaaactcctgaccttgtgatccacctgcctcggcctcccaaagcactgggattacaggcatgagccactgcacccggcctatcctgttttttttttctggaagtcttccagtttcaagtttacatttaggtctgtgatttattctgagttaatttttacatatgatgctatcatggctccatgttaatttttgtgaatataaatatccaagtattccaacactgctctccactgacttgtttttgcatatctattgaaagtcatttttcttcttcttcttctcctccttctttttcttcttcttcttctttttttttttttttttgcccaggctggagtgcagtggcgtgatcttggcttgctgcaacttctgcttcccgggttcaagcaattctcccacctcagcctcccgagtggcttggattacaggtgtgcgccaccacacctggctaatttttgtatttttagtagagatggggtttcaccatgttggccaggtggtcttgaactcctgacttcaggcgatctgcctgcctcagcctcccaatatgctggaattacaagcataagccactgcaccagccttttcttcttatttgaagttattttgcctcttctagttcctttgcatttccgtatgtattttagaatcagtttgtcaatttctaccccaaaacaaaaagccttccaatttggaactgtgttgaatctatacaacggttttggaagaactgacatcataacaatattgagttttctcaccgaggaagagggtatatacgtccattgaaataccttagaaatgttttttagttttcaatgtacatctttcacatctgctgccagatgtatttctaagtatttcatggttttatggctattttaagtgatgttgctttcatttccatttttgattgctagtatatagaaacaatagatttttgtatattgatcttgtatcctacaatcttggctaaactcacttactagtgctaatatagtttttatatatttcattggattttctacatagatgatcatgttttctgtgaacaaaggcagttttacttctttctttaccttttctttacccttctaggactccaaatgcttgtatgtatgactgcttggtacttttttcaggttgttaaagttccattaatttctgttacaatcttctttctttttctttctttgctctgtttggataatttatattgacctgctttcaagtttactgattctcctgatgtgtccagtctgctactaatttcatccagtgacttttttatttcagatatttcatttttcagttctggcatttctatgtggttctattttacagtttcaaatccctcctcaaataactgcctcttcacccattgtatctgtctcgttctgaaacttatcatgaagtccttgtgtgcacgttctaatatgtaggtcatctgtgggtctatttgtatggactgatttttctcttaactatgagttctgttctcttttcttttttgcatgttttataagtttatttgccaattactgtgtcttaaaaaaaaacagtaaaggttgaagtacatttaaaaatatatatatgtgtattttttctactgccactcttaagaggaaggaatgccctttcttctgttgaacatatagagttagggactgatcagtttgatccattcaagagttaagctggtttgggacacggttgcaactttaatccctctacctccctcttgtgtctctgcctttgtctgtctctttctctctctttctctgttcctggctgctccctcttcccgttcccttgtacactcctttcagctaatctatttccccctaccccatctccctcaaactggaagcttctggcagaggagaaggcagctgtacttcgggcagtggaggaacgtgagcgggccgaggcagagggccgggagcgtgaggctcgggccctgtcactgacacgggcactggaggaggagcaggaggcacgtgaggagctggagcggcagaaccgggccctgcgggctgagctggaggcactgctgagcagcaaggatgacgtcggcaagagcgtgagcagggcccccgctccccgggacacactgggtgaggggagacacgtacatgcatgtatgctttcacacatagaacatgaaaaacaaccagccatcaaagtcatatgttcatgcacaaagagaacaagagggctgggcatggtggctcactcctataatcccagcactccagcactttgggaggccaaggtgggcggatcacctgaggtcaggagctcaagaccagcctggccaatgtggtgaaaccctgtctctactaaaaatacaaaaattagccaggcatggtggcacatgcctgtaaccccagctacttgggaggctgaagcaggagaatcgcttgaattcaggagggagaggtttcagtgagccgagatcattccactgcactccagcctgggtgacagagcgagactgtctcaaaaaaaaaagagaacaagagggggactgttcagcaaacatttgcatccatatagacacacacagcgtgaagagaatctccaccaaacactgtgctaatgcacacgcatagaaagtaaggagagccattcaccagaggcaggtcttcatgtagacattcacagaacgtgaggagaatcttccatccagcacatgtgttcacacacagaatacaagagctgctcacaaagcacacatgctcacatttgtgtacacgggatgtaaggagaatcttctattacttgtttttgtttgttttttgttttgttttatttttgagatagggtcttgctctgttgcccaggctggagggcagtggtgcaatcatggcacattgcaacctcagtctcctaggctcaagcagtcctcctgcctcagtctcccgagtagcagagactacaggtgcattccaccatacctggctgttttttaaattttttgtggagatggggtcttgctgtgttgcccaggctggtcctgaactcctaggctcaaacaatcctcccacttcagcctccctaagcattgggattacaggcatgagccactgcaccttgctgagaattttccattaaatacacatattcatgtgcatatgtacacatacagcatgagaaaactactcaccacacatatgtatggatgctcagagagagaacacgaagagaatttactacaacacacagcctgagaaccactcccccgacatgactaggtgcatgcatacatacataacacacatacacacacacacacacacagtgtgaggactcccactttgcctgccaccaattccactgagcacacacagactctcccaccaagcctctgtcttcccttaactcgtgtatccctccagggcctgtagggtggtgccccaaggcttctcgcaggctcccctcacccagccagtgtcccagccttccgaatggtcaaaatgacccgccacatcctccactccatccttccttcattcatcctctgaatacatttatggatcacacccagggacacaggccaccctcactaatgatgggaggcactggcagaatttgttgagctcctgaatagatgctgtcttgacatccttatttctttattttcccaacaacgtgcttctaggagtccaatgggtgagggctttatcttctccacgcacttagacgttgatccgattttgcttttagccaggcctggagagaacccctctctccctgacacagacctggcctgcagccctagggataattgagctaaaacccagctcatacttgagccgttaaggtccgtcccttgggaaaaatgtcaggttatttgtagtgactccaaaggcccttgtgggaaacaggatgttgatgggagaaagtttgatcccttcaagtaaacaaaataaattggcaagtaccaaataggaagggaggctagagggcccattccacggaccgaaagtagatactgtcagtgaccagaattgtaatgaacatcatgtgggcagtggcgatccacagacataggccttgctctgtggaactcacagttcagtgcgggaggcgggtgttgcacaaaaagccacctaagcaaatgtcaaatgaccactgtgactagggctaggtaggagaggggccccagtgccaggagcatgggtagcagagaggccctgatgggttaagagaggcttccttgaggaggtgacagttaagtaaggagaggggtgaagggggagtctctgaaaattcataagcccagctctattttcacagcatttgggggtttaattcatacctccctgaaagatcagggaccctcccaaacagaaaacccaatagaagtagatagtgggtcggtgacaccctggggagtctggcaaacaccagcactgatgaccctggagctacgtgccttcaacccattcgcacagaattcccaaagatgaattcccagtgagtgagctcacagtgcaaaattacaaaactcagagggaataatccaccatgagtgagagtcagctgacctaacagacgcttgtattggactctgaagggcttcagataatagaattatgaagcatcagttattcatgaaatacattttggggtgatgctgaatgagacacctaggaaggagccgttcagcagattttgaatggatgaatgaacaaactaggatgggcacactgacttgccatctccccatcctccatcaaatcttcccctactctagctaggctcctaacctcctctgcctcagtgacccaggtacccagcagctactctccccaccaggtgcatgagctggaacgagcctgccgggtagcagaacaggcagccaatgatctgcgagcacaggtgacagaactggaggatgagctgacagcggccgaggatgccaagctgcgtctggaggtgactgtgcaggctctcaagactcagcatgagcgtgacctgcagggccgtgatgaggctggtgaagagaggcggaggcagctggccaagcaggtattgtcacacagaaggccacagggtgccagtccagctggggtatgccatggtgtgtacaggcagcaagaagggcagcaaggggtctccccgacccacccaccactctgtctcctccacccgccgaccactcagtatctccccaacccttccactgctcagtgtctccccacccacctgccactcggtgtctccccacctgcctgccactcagtatttctgccagtctctcgtgccagccaaaccatcttcctcccacaaaaccatcttcctattccccaacccattaacctgccatgacccattaacccacacacatatcctgttgacctgttgctgtacccaatcatacatcctccatccaccacacaaaccattcacccatccatctgccaccccatctattcaactaccctaaccacccacatacagcctctcccccaaccagcgttgtgtccaactactgctccatccacccagtgactcccttccaacccatctcctctccccaacccaacccctcccctatttacccaaccccagcccctcagcaccccctgctgactccacttagtcactgactcactgacctgctcatccgccctcccctccatccacatccttccccaatccagtcagtcatcgctccctcgcttccttgtttgttccattgctctctccctccctgcatcgttcattcattactcgttcagtccaggaacttcccatgtctcccctctactaggtggtgaggggcaggggcagctctgggtgtcagaaagaccccgctggagccatgtaggcaacagacttggggtggagggtgctagaagctggggaggcagggaagagaggtgaacaggtgacctaaggccaggggtctctgcagggttttgtctctgctagcccctttgacttagacatggctgagtgtccaagacttggccctgggggcactggggaaccatgggagggctatgagcaggatcagctctggagacgtgttggaatgggctggaggggagagatgagaggctagaaaggaggcttaggtgagatgggggactgagctggggcagtagggatagagaggagaccaagtaaagagagtcagggagtgagaggagcggggcttgcagcctgggcaggagctccagggcagacatccatgtccctagcacacagagggaggctgggcttcctgtgtctgacccggtccctcctgacctcctctccagctgagagatgcagaggtggagcgggatgaggagcggaagcagcgcactctggccgtggctgcccgcaagaagctggagggagagctggaggagctgaaggctcagatggcctctgccggccagggcaaggaggaggcggtgaagcagcttcgcaagatgcaggtaagagccggcgtgagctgcagggaggggaggctttggtgtcttcaagccccaaccatcactccagggtctaaggctagctcggacccctcgctctcaacccacaggcagcatccgcatgggtcagcacctttataaacatccatgccccagaggctggcttccttcttcttctattttacatttctttcatttaaaatgctgcacttttaagtcaaatttcctcatttttttgtttgtttctttgtttgttcagttggtttttttttttttgagacagtctcattctgtcacccaggctggagtgcagcgacgtgatctcagctcacagcaactctgcctcccaggttcaagcagttctcctgcctcagcctcctgagtagctgggattacaggcgtgcgccataatttttgtatttttagtagagacaaggttttgccatgttggccaggctggtctcgatctcttggcctcaagtgatccacccgcccccatggttttgtttttgaagtgaaaataccatatggttttttggccagacacagtggctcacacctgtaatcccaccactttgggaggccaagatgggcagatcacctgaggtcaggagttcaataccagcctggccaatatggtgaaaccctgtttctactaaaaatacaagaattagccaggcatggtggcacgcacctgtggtctcagctactcaggaggctgaggcaggagaattgcttgaatccgggaggcagtggttgcagtgagttgagatcccaccagtgcactccagcctgggtgacagagcgagactgtctcaaaaaagtaaagatagaaataaaataaataaatcaacagtaggcaaactgaggctcagagaggggcagtggctggctcacagtcacccagcaaggatatggccaagttgtaattcaaacccatgtctatctaacttgaagccaggctccatcaggcttccagctgccttctagttctcagccaggtcaacctcctcccttgaggaccagagtgggagaggctggctcagggtcacacagcaagtggctttatacacaggagcccaggtctgcagggttcggagagttccctgcttgttcacgggagctgaggagccccgtcggtctggcaagggggtggaggagttccctgtgctgtgtggccaggctgagcccatctacctattccgttccacccaggcccagatgaaggagctatggcgggaggtggaggagacacgcacctcccgggaggagatcttctcccagaatcgggaaagtgaaaagcgcctcaagggcctggaggctgaggtgctgcggctgcaggaggtgaggctggggtaggctgggccctgggacaggaagctgggaggtgggcaaggctaaccttgaggtccctggatgtgaagctggggaggtgggcggggctaaccacagggtccctggatgtgaagctggggaggtgggcggggctaaccacagggtccctggatgtgaagctggggaggtgggcggggctaaccacagggtcccagggtgtaaggctcgggaggtgggtgtgtcttaccatgtggcctgcaatgccagcctaagagcagggattttgtcttagggcactagggagccatggaaagatccagaacagaggatgggcagggtcagctctgtagcagttgaactggagtggggagattggagtcacaaaggctgtgggagtgggagtgggagaggggagagagagagagattgagaaagagagagagaaccctgagccagggccaaggggatgcagaggacggagaaggcagtcagaaggcaggagggagaaggctatggtgaggggggccggaggaggggaggagagcactgggggtctggcccggtgattgggggaccctggaggagaggcaggtttgagaggaggacctgtgtgcagtaaaaggtggagagggtgaggggcctgggggttgggctgcaagaggtgagcacaggtcaggggctcaggagacagatttaggagacatctgtaggttgcagctcattccagggttacccagggacagcatgagaaaaaagccaagagccttgaggtgtgagggacagagaaaggggtgagacccgtgcccagattgcttctcctcacacccaccggccacccctccatcatcacaggaactggccgcctcggaccgtgctcggcggcaggcccagcaggaccgggatgagatggcagatgaggtggccaatggtaaccttagcaagtaagtgccccaagggtctgaaggctgaggtactgcgtctgcaggaggtgaagctggggtaggctggaggtggctgggctctgggacaggaaactgggaggtgggcggggttaacctcggggcccctggggtgtgaggctggggagatgcgtggggctaaccacagggtcctgtagtgtgaggcaaggcaccctcctctgaccatcctgtcctttcatccccacgccttcctgtctccctagggcagccattctggaggagaagcgtcagctggaggggcgcctggggcagttggaggaagagctggaggaggagcagagcaactcggagctgctcaatgaccgctaccgcaagctgctcctgcaggtgagcgtgattgaccgcccccaccagcctcagtccccattgacctgggaccgtaaccttcagtcctcttattcaacaaatatagaaaggggatatttgagttgggttttgaaggttgaataggagttcttaaaagggttgaaaggcatgattcacttgtatttctgaggggtttcttcagggctaaatccaaagatgaattatgtggggaaacagacatgggccagcaagtgtgatcatggaagtctcctgggcccagtagagagagagaaaagactttctgcaggagtcataagaaaacatttggaaaaagagacatttggctgggggttttaaagcataagttggagttcagcagagggagaaaagcatgttttcctttgcatatttatttataaatattttctgaggattccggtggcccagatcctattccgggttatgctggggacctggagatggttaatactaagcctctgccctcaaacacgtcttagtctaaaggaggaaatagaccatcccaatacagagatacaagtgaaaatggaggaaacacgggcactgtgggaacctagaagggactaccaacctagcctggaggatagaggccatcagagaaggcttcctggtggaggtgatgccttgagagatcttaaaggaagtgtaagagtttgccaagaagacaacagagtgatgggatttccaaggacaaaccaatgtctgcattcttcattagtttttttctaattttttttttttttttttgaggtggagtctccctctgttgcccaagctggagtgcagtggtgctatctcggctcactgcaacctctgcctcccaggttcaagcgattctcctgattctccaattttctctacaaaatatttaaaaattagccaggtgcagtggtgcatgcctgtagtccaactacctgggaggctgaggagggaggatcgcttcagcctgggagattgaggctgcagtgagctatgattgtgtcactgcactccagcctgggtgactggatgacagagtgagaccctgtctcaaaaaaaaaaggtaataattatatgctcaacagttatgtgtagtaagactactttttaaatggagagaatggggaaaatatgcaaaatgttttaacctactttaattgatggtgatagtattagcactgtttttctgagacattgagtttataatgtgggataaagtaaatgatcaaagatgggatactatgtcatctactacgtccttgacatcagggtactcagcaccaaagaaccttgatatagttgtcctagagaagagattaagtttttttttttttttttttttaaaaacaggccaggtgtggccgggcgcggtggctcacgcctgtaatcccagaactttgggaggccgaggcgggcagatcacgaggtcaggagatcaagaccatcctggctaacacagtgaaaccccgtctctactaaaaatacaaaaaattagccgggcatggtggcatgtacctgtagtcccagctactcgggaggctgaggcaggagaatggcatgaacccgggaggcagagcttgcagtaagccgagatcgcaccactgcactccagcctgggcgacagagcaagactccatctcaaaacaaaaaacaaaaaaacaaaacaaaaaaaacaggccaggtatggtggctcatgcctgtaatctcagcactttgggaggccaaggtggaaggatcgcttgagcccaggtgtttgagaccagcctgggcaacacagtgagaccccatctctacaaaaaatatatgtgaaataaaaagagaaaagaaattacgtttagtggggcgcagtgggtcacgcctggaatcccagcacttttggtggattgcttttagcgtaggagctccagaccagcttggatgacatggcaaaactccatccctacacaaaattgaaaaattagctgggtgtggtggtgcacacctatagtcccagctacccaggaggctgagttgggaggatcacctgagcccagggaggtcgaagctgcagtgagccatgattgcaccactgcactccagcctgggcaacatagtgagaccctgtctcaaaaagaaaagtgataaattatgtttaaaaaatagtttaagccaggcgcagtggctcatgcctataatcctagcactttgggaggctgaggcgggtagatcatgaggtcaggagttcaagaccagcctggccaacatggtgaaaccccgtctctactaaaaatacaaaaactagccaggcgtgatggcgggcacctgtagtccagctactcgggaggctggggcagagaattgcttgaacccaggaggcggaggttgcagtgatctgagatcgtgccactacactccagcctgggtgacagagcgagactttgtctcaaaaaaaaaaaaaaagtttaaaaacaaaactaagcaaacccctgtagttctcaatttgacttcatcatattcacgtgaactggtgatgtattttatacagatccagtctctctgaccacccaaaaggcctagaaacagggaacccagtagcaatgagtatccctatatccacgttgtgatctggaaatgctgtttccctctaaaagaaactggggctggctgggcgcagtggctcacacctgtaatcctagctccttggaaggctaaggcaggaggattgcttgagcccaggagtttgagaccagcctgagcaacccagtaagaccccgtctctacaaaaaaaaaaattagccaggtgcgatggcgggcacgcctgcggccccagctactctgagggctgaggtaggaggattgcctggatccgggaagcagaggttgtagtgagccagaattgtgccactccactccagcctgggcaacagagtgagaccctgtctcaaaaaaaagaaaaagaaaagaagagaaatgaaactggagcttcttccgaagtggctgattccagatctggagcaggcaatgaacaagagtaacccagaacattttgcgatacccattagcaggaaagatagtatagttatgtcaagagcacgtagaagtcaacgtgaagagcctcgcgctggcccaaagtggggcaagttgagcttcaatgaggaaaataattgcaactgatttaatcccttgaaatctgtttaaattcaacagcaacgttttaaaaaaatattaattagttgctgtgttagttccctagggccaccataatgaattaccacaaacacagtagcttaaagcaacaggaatgtattctctctgtttttttttgtttgtttgtttgtttgagatggagtctcgctctgtcacccagactggagtgccgtggtgtgatcttggctcactgcaacctctgcctcccggattcaagtgattctcctgcctcagcctcccaagtagctgggactacaagcatgcaccaccatgcctggctaatatttgtatttttaatagggagggggtttcaccatgttggccaggctgctctcaaactcctgacctcgtgatccgcccgcctcggcctcccaaagtgctgggattacagacgtgagccaccgcgcccggccaggaatgtattctctcgtggtcctggaggccagaggtctgaaatcaaggtgtgggcagggttggttcctcttgttcatgcctctcccctggcttcccgtgggtgctggcagtccctgctgtttcttcatctgtagatgtgtcattgcaatctctgcctttaactttacaaggcattttcccatctttgtggctctgtctcatctcctctttttttttttttttttttttttgagacagagtctcgctcttgtcgcctaggctggagtgcaatgggctgatcttagctcactgcaaccttcacctcccgggttcaagcgattctcctgcctcaacctcccgagtagctggattacaggcgcccaccaccacatctggctaattttttttgtatttttagtagtgatggcatttcaccatgttggccaggctggtctcgaactcctgatgtcaggtgatccgctgcctcagcctcccaaattgctgggattacaggtgtgagccaccattgcctggccctcatctcctcttaaaaggacaccagccgtatcagatttgaggcccaccctaatccagtgtgacctcgcgttaatcaattacaactgcaaagatcctatttccaactaaggtcacattccgaggttctgagtggacatgaattttgcgtgggagtctattcaccccatgggtgcatggggagggcatgggggaggggcatggagcttccgtgccctcctgggagcgccaccctccaggtactgcacatgttcagcttccagaagctgcccaaaccctgtcctcttgggccttttatggagacgtcactggataggtgtgattaacaaccacgtagaaatgtgattggacaaaaagggtccgatctaaacccagcgaggcctgtctgttcagattcttcctggcttctctatgcagcattccttccccctctgaaatgagggtcctgtgatccacagtcaggttagagtttctgccttgtgcaggtgaaagagggggcaggaggaggttagagagagaggttctgtttactctaaaagggctatgcaaattatgatcaaggaaccatggacaaaacccaacacacacacaaacacacacacatacacacacacacacatgcacacatgaagtatatacgcaaagcaatatcacaggtacaaattcccttgaaaattcacaaataaggccaagcgcggtggctcacacctgtaatcccagcactctgggaggccgaggctggcaggagttcaagatcagcctgaccaatatggtgaacccctgtctctactaaaaatacaaaaattagccaggcgtggtggcgggtgcctgtagtcccagctactcagcagggtgaggcagaagaatagcttgaacccaggaggcagaggttacagtgagccgagatcgagccactgcactccagcctaggcaacagagcgagactccatctaaaaaaaaaaaaaagaaaagaaaaaagaaaattcacaaataagacagaaagatcgggtgcagtggctcatgcctgtaatcccagcactttgggaagctgaagcaggtagattgcttgagaccaagagttcaagaccagccaggacaacaaagtgagaccctgtccctaccaaaaacaacaacaacaacaaaactatcagggcatgatggtgtgcacctgtagttccagctagtcaggaggctgaggccggagaatcgcttgagcccaggagtttgatgctgcagtgagctatgattgtgccactgcactccagtttggacaagagtgagaccctgtctccagaaaacaaaaaacaaaaaagaaagaaagaaagaaagaataaagtccctggacacagctgccaatttccaggaaacacagaggagagacaaataaatgctgaattagaccgtaagtgtgtgatcagaaaaatccagacagagaggaactctacaaggctaacaacctacattcttcaacagataaattgtaagaaataggctgggggcagtggctcacatctgtgattccagcactttgggaggccgaggcgggcagatcacctgaggtcaggagtttgagaccagcctgcccaacatggagaaatcccatctctacaaaaaaatacaaaaatgagccggacgtggtggtgtgtgcctgtagtcccacatacttgggaggctgaggccggagaatcacttgatcctgggaggcagaggttgcagtgagctgagattgcaccactgcactccagccttggtgacagagcaagactccatctcaaaaaaaaaaaaaaaaaaaaaaaaattttaaaggaataaaagggatggaggagggaactgcaggttaaaagagacttaaaagacatatatctggccgggcgtgatggctcacgcctataatcctagcagtttgggagaccgaggtgggtggatcacttgaggtcaggagtttgagaccagcctggccaacatggtaaaaccccatctctactaaaaatacaaaaattagccaggtgtggtggtgcgtgcctgtaatcccagctactcaggaggctgaggcaagaaaatcgcttgaccccgggaggcagagattgcagtgagccgagatcgtgccactacactccagcctgggtgacagagtgagactgtgtctcaaaacaaacaaaaacaaacaaacaacaacaacaacaaacccacatacatctacttttttaaatgggtaggattcaactataggatctagggatgcatctgtgtgtaataaaactaaagacatacaaggaaatgaggacctgagaagtcaggataacatgatattttggggagaaggaagaggttttcattaggagtagtgcatgaaagggcttctggaagggcaaagttctctttcttgaccaaggtgctactgacagtgatgtctgccttttgttaactcatgatgcctgtgcgggatgacacccacacacatccatgttcagagacaggaagcagcagggtcatggggctgaaacggttctcatctccagctgctggaataatcaggaacactcccataatgttcttggttgagaattactgtgctaataaaactagcagaatatttattactgattttttttatttgattaatgtttggctctctgtatcaccattttatttcacaataaaaagtttgaggccgggcgtggtggctcacacctgtaatcccagcactttgggaggctgaggtgggtggatcacttgaggtcaggagttcgagaccagcctgaccaacatggagaaaccccatctctacaaaaaatacaaaaattagccagttgtggtggcaggcacctgtaattccagctactcaagaggctgaggcaggagaatcgcttgaacctgggaggcagaggttgcagtgagctgagatcgtgccactgcactccagcctgggcgacagagcaagacatggtttctaaataaataataaaataaaataaaattagcaggggtgatggtgtacgcctgtgatctcatctactcaggaggctgaagtgggaggatcacttaagcttgggagtttgaggctgcagtgagctgggatttcaccagctgggcaacggctgtgctccagcctgggcaacagaacaaaactgtctcaaaaaaagttttttaagttaaaaaaaaaaaaccccacaaaggagaatatgctaattacccagtcattgtgtccctgcgagggtaaaataaagtatgaatcagactgggtctgactcacttccatgtacccagcagaaggcctcgctcagagtacgagctgaataaataaacgggaactattattaggggtgtgtttacacattttccacgtagcagctactgtttattgaggccgtgtttctcaaaatgctcctgcatataacacctgagatgcccgttataagtgcagattcccagactccactttggtattgctgagtcagaatctctgaagggtgagacccagatgtctgcatttttttcccaagctcccccagatgatcctggtgcaaacaaaagtgtgataacccttagaatggactcattcacagtcagaagtagaatttatgacatttaaacaagtttgtgatggtctcgtggacttattaaagtaagcagaaaactatccaaaatgttaagacccagggctggcagtgctgtgggtgacaagtcaataaactattaataaaaatacaagctaacatctgttgagtatttagtatgtttcaggctctgtgctatgcgtgtgacaatcatcagtgcacttaattctcagaggtgcctggatttacctaccaccttccctctgagactccaccatgacatccttccttcccctcctgctacaggtagagtcactgaccacagagctgtcagctgagcgcagtttctcagccaaggcagagagcgggcggcagcagctggaacggcagatccaggagctacggggacgcctgggtgaggaggatgctggggcccgtgcccgccacaagatgaccattgctgcccttgagtctaagttggcccaggctgaggagcagctagagcaagagaccaggtaggtgagagcggaggccacaggagaaaggtgacctccacattctggttggtgagaggaaggaggctgtgttacaaacacgtggtttagaaacatccaaaagacatcatcatagtaatgactgctggcctggcatggtggctcacgcctgtaatcccagcactttgggaggcagaagcgggaggatcccttgaggccaggagttttcagaccagtctgggcaacatagcaagacctcatctctaaaaaaaaaaaaaaaaaaaaaaaagccaggtgtgttagcgtgtgcctgtagtcccagctgctcaagagcctgagataagaagatagcttaagcccaggagtttgaggctgcagtgagctgtgatcacaacactgcactccagcctgagtaacagtggaagaccttgtctctaaaaaaaaaaaaaacagccaggcacagtggctcacacctgtaatcccagcactttgggaggccaaggcgggcagatcatttgaaggcaggagtttgagaccagcctagccaacatggtgaaaccccatctctaccaaaaaacaccaaaattagctgggtgtggtggctcatgcctgtagtcccagttactggggaggctgaggcaggagtattgcttgaactcaggagatagaggttgcagtgagccgagattgcgccactgccctccagcctgggtgacagagccagactccatttaaaaaaaaaaaagaaagaaaaaaagaaaagaaaaagatgccaggcacggtggctcacgcctgtaatcccagcactttgggaggctgaggcgggcagatcacctgaggtcgggagttcgagaccagcctgaccaacatggagaaactgcgtctctactaaaaatacaaaaaattagccgggcgtggtggcacgtgcctgtaatcccagctactcgggaggctgaggcaggagaatcgcttgaacccaggaggcggaggttgtggtgagccaagatcacgccattgcactccagcttagcaacaagagtgaaactccgcctcaaaaagaaaaaaaaagaaaaagaaaaagaaaaaacaaacaaagtgtgtaaatatatgtaaatatttaaatgattgctgattttctgtatcatttaggatgctttgggctgcaagtaactgcagtctcactacgagtattatttacgtaataacgtgccagttagttatagctgaattacaaactactctgaaacttagtggcttaaaacaacaaccatttattattgcttatgagtctttggctagtaagttctgctcatttgggcttggtgggcttcactcatcatccgctcagttgagggtcagctagatggatttgctaatcttggctgggctttcattttttttttcttttttcttttcaagaacagcatgagtggtattggctgggcttgcataactcttaaggctttgcctaggacaactaagctaacttgtctctgctctatgtggcctctcatcctccaggaggctagcccaggattgttcatatgacagagtcaaggttctaagagcaagggaaagtgctaaagactccttgaggcctgcacttggaactggtactgtgtcacttctgccatatcctattaaccaaagcaagtcactcagcccgctcagattcaaaggaatggggaaatagatatgactgtttgataggagcaactgcaaagtcatattgccaagggtatggatacagaaaggggtgagaactgggaccatctgttgtatcagtctagcacaaagaggaatgtctttttttcaagtgataagaagtctagagctaggcagccaaaagatggtagggctctggatcaacatctgtgttgttttttagtcttttcctcatggtcataaaatggctgcaattgcaccaagaaccatacccacagacatccatgttcagagacaggaagcagcagtagtatggggctgaaagagtttccatctccagttgctggaatgaccaagaatgcccccataacattcctagttgagaactgctgtgctaataaaatgaacagaatatttattactaagcctaatacctttcactcttccaatacaatagattttcctattgctcagtactattcagcaacaataattacaacaatactaatagttcctatttattgaggatttactatatatcaggtgttggactacttgtatatacctgtatgataccacataatccctgtgagagaaagaccattgttatcctattttgcatgtagaaaaactgaggctgagatgggctataaatgtaggatacttgacttgctattcatcatctgcacattatctcatggggaggaatgttattatattatacatcaaatttatataaggttcccttttgtattcattcattcaacaaacaaatattaagagtgtactgttggggccaggcatggtggctcacgcctgtaatcccagcactttgggaggccaaggcgggcagatcacttgagatcaggaattcaagaccaacctagccaacctgatgaaaccccgtctctaccaaaaatacaaaaattagccgggagtagtaatggacacctgtaatcccagctactcaggaggctgaggtaggagaatcacttgaacctgggaagtggaggttgcagtgagccgagatcacaccactgcactctagcctgggcaacagagcaagactccgactccaaaaaaagaggagtgtactgtttaccttcccatgtgctggtcactgaaaaaattagacgtaccatggaagtatgtctaattacctccatggtatgtctaataccatgtctggtgggattccccaaggtgaaagactcatgagctggacatggcaatgaaggcctatgaactagaagggttgaagggacacagatgaagaagaagctggaataccctgagatgtagtggtttgggaagggtatctagaggaggaggcacttgagctggagctgacaagaatgggatttccagggcttagagtcccaagtcagttggcagctttgtgggaaagtctgggagacatcagggcatttggaggaggagtgtggttggttctgagagtctgggacccaggagagggatcagggagacagggaggtaaatgaggcttgaagcacacagagccttgaatactgggccacggaactctgttctgtgggcagtggggagccctgggggcaatggggagccatgggaaggctgtgggctggggagggacacggccagctctaggtatagaaagatctctctggggctaaggtgggaatggatcagaggagggagactggaagctgggaggtttggaaggagtctggaatgatggtccaagcagaacaagatgaggcctgagctggggctggggctgtgaagatgaacaagagaggatgaagaagagaaagcagggggcagaaggaatgaagcggaggctatgggtggtggcaggggaagaagacactgtttggagctaaggcctggtgactgagggaatattggctttttggaggaagatgctaaattcgttgtggaacttgatgagagtgaaaggcctcagggacaggcagaaggaaacggccccagaggtgcatgagacaagtggttctcagtccacagggtcacccaggggccccagggcttatgggaactgtagcttgaggtctatggggacccctgctccattatacaaatgaggaaactgaggttccgagggagtagatgagttgcttaaagtcaccctgcaccaggtgcagtggctcatgcctgtaatccccacactttgggaggctgaggcaggaggatcacttgaacccaggagttcaagaccagcctgggcaacatggcgagaccccatctctacaaaaataaaaattaaaaattagcccagcatgatggcacacacctgtagtcctagctactcgggacactgaggtgggaggatcgcttgagcccaggacattgaggctgcagtgagccatgatcacaccattgcactcctgtctgggcaacagagcaaggccctttctcagaagaataataaagtcaccctgggagcaaagaatgaccagatgattcttagctgaagaagtctcagccgggcgcagtggctcacgcctgtaatcccagcactttgggaggccgaggcgggcggatcatctgaggttgggagttcgagaccagcctgaccaacatggagaaaccctgtctctactaaaaatacaaaattagccaggtgtggtggcacatgcctgtaatcccagctgctcgggaggctgaggcaggaacaattgcttgaacccaggatgcagaggttgcggtgagctggagatcgtgcctttgcactccagcctgggcaacaagagtgaaactctgtctcaaaaaaaaagaagtctctctccttcatccttttccactgcttagtgccttcccactcgcccccagccctgtgccttcctctcagcacatctggggctgttgtatccagggtggctgtcaagcaatcccgattgctagaggtcccatcacatggacttcaccccagatgtgatggtccatgcaggagaggacaggtgtaagggcagaaagagtgttccctcccgctctgaagattcaagtctgctgaaataaactgacaataaatagattaacaaaataaaaggctacaaatatattaatgtgcatgaacacaggagccatgcaaaatataagactttttatacagggtcagatggttgaggcttaagtatcctctttataggggagagagacaaaaaggatgtattcaattgtgagagatagtaaatgattttcaggggaaaatgaatgggcccaaagagtaaactgtagtttgtaaatgatcctctttggaaactgaataggaccaaacatatacttattataactcacaacatcataggaaacaggtatgtgaggtgtcctagtagaagccaaggacatggatgccgaggagaaggcagcctgcatgtcagtgtttggcctcagtaaactgtgggaaccacttaggggttaggaaagagggaagaagccaatccaagaacaaggtgacagccactgcatgagtctatggggacaaaatcctaggttgagcccctctactgagactcctcctcatccctctcttcagagagcgcatcctctctggaaagctggtgcgcagagctgagaagcggcttaaagaggtggtgctccaggtggaggaggagcggagggtggctgaccagctccgggaccaggtaagcagctggcatcattagggagcagtggagagtgtgaccactggctgagaaattgcacaggctgtctccagaggcaatgagctcccatcacaagaagcaatgtgcaggtgctggactggaactgaatgcagataccatcttggcacttggcacatcagcagagggttggaatcagtgagtttgcaattcataaatgctggcatctagaaagggccctgtagggagctgaggaagccagggcaagggaagaagttaaaccctacccagaagctagaccaggactagcttctatgtaccaggcactgtgctaaagacataacatttactgtgtttaattcttatcagaatggtagaaggaaggtgctattatttaccctcttatttatgtgaggaaactgaggtacagaaaggtgaagtaacttgctcaaaattatttagctggtaagaggtggggtcagtattcaaacctcagcactctagccccagagtgtgtgttcttgattacttactgagcagttactgtgtcataagcaactgctttttaaaaaatacatatttgcatttcctcactagtcccatttcacagatgaagaaactgaaactttaagaggatatattttgcatcagagtcacagagatagagcctggatcagatcccaggtctgtctggacagagtccctctgcccttaaaagctcagctgtgctttattcgccattcattccacaaacaattattgagcacctgctatgtgccagacactgtggtaggcattagggatatggatgtgaacgaaacagaggaagtccctgccctcatggagctcacattttctgcataggatgagacgtaataaacctgtaaacaagcagataattacagattgtgacaagggctatgaagaaaaaaagtgaagagagaggaagacacagaggattggggaatcctcttcaggttgggagatcaggaagaactctttgagaaggtgacatttaaattgatacctgaagggtgaaaaagagccagtcagagggaacagcaagtataaaggccttgaagaatagaaatacgtttggtgagttcagaacaaaaagcagattagtatggtctagataaacatctgttgttattttagtcctggtctagcttcttggtagagtttaacttcttccctcactttggctgcctcagctccctacaagggcccttcctagatgccagaatttataaattgcgaagtcattgattccaaccctctgctgatgtgccaagtgccaggatggtatctgcactcacttccagtccagcacctgcacgttgcttcttgtgatgggagctcattgactccagaaaatgtgggataggaaggctgaacgataagaaatgaggtcagatcatgtatgttccctccctgaagagagaggtggtagggtctggggaggatctcagtgaagttggtctggacagtgggtttatgggaagagagaactggacaagaaaaagaccctgtggggcctggaatgccaggctgaggggctggaaccttgtcccgggggtactggggagccatgaaaggattgtgagcaggagggtctgggtcagctctgggtataggaagacctttctgaggccatgtaggagacaacctggaggggagagactggaggtcagggtagaggctggcatgagggatttaggagaaaagaacaaggcctaaacagagagcagaggatggggcagagagagtcagggggcagtagggatggggcagtagtgggctgttggagagggagggagtgatgacagtacctggagatataacccagtccccctgcttccatcaagctggagaagggaaaccttcgagtcaagcagctgaagcggcagctggaggaggccgaggaggaggcatcccgggctcaggccggccgccggaggctgcagcgtgagctggaagatgtcacagagtcggccgagtccatgaaccgtgaagtgaccacactgaggaaccggcttcggtatggtcatcccacgtacaggcctgacgggtggggagcaccctaactccataaaccccagggacgcgaggccgtgccaggggcaacaacagggggaaatgggatccacgggggtgtggggctgtgggagcagcggctgtgttgcgggagagccaaatccaggtaacttctttcttcccacacccatttctccctgtcatctctgtgccctcctttcccaccgtgcaccaccacctttctctcctttcctcctctctgtgtgtccttcatctctctctgccccccattgcttctgcccgtctccctccatttctcttgatctcatccctctcttcccccttattttgttctctctcttcctatctctctctctctccccctcatctctctctctcctccccctttctcctcccctcccctcccctcatttcatctctgtatcctggtctctcctccccacagacgcggccccctcaccttcaccacccgcacggtgcgccaggtcttccgactagaggagggcgtggcatccgacgaggaggcagaggaagcacagcctgggtctgggccatccccggagcctgaggggtccccaccagcccacccccagtgaccctaccctgtccccagatgcactaacagatggggcccagcccccttcctccctggaccccacgggcccctgtcccaggaaccccgccctctgacttcttgccctttggaaatggtgcagcactctggcatttatcacccccacctgggtcccctgcaacctcccatcaaaggatgacccctaaacacagaggagcggggcaggcagggaggcaatgactggagctaccttgcttgttgggggactgggtacagttggcaagctgtgtttccatcagctccctgtcctcctttcttccctcgttattgatctatagacattaggaagggagtgagacggctcctccaccatcctcagccagtgcaacccattccctctgcttctctctctctctctctctctccctccctctccttccctaccctctcaccatctttcttggcctctctgagggtctctctgtgcatctttttaggaatctcgctctcactctctacgtagccactctccttcccccatttctgcgtccacccctgaactcctgagcgacagaagccccaggcctccaccagccttgaacccttgcaaaggggcaggacaaggggacccctctcactcctgctgctgcccatgctctgccctcccttctggttgctctgagggttcggagcttccctctgggactaaaggagtgtcctttaccctcccagcctccaggctctggcagaaataaactccaacccgactggaccatctctgtggctgtgtgtgttcctgcagggggtctctgatggggcaggatgggcacaggctgcttcagcctgctagggcagcaggtcaggcagcctgctggttagaatgacacctgcgtgggtatacagggacatcctgtggatcaggcgcttcataactcctttcctcctgactccagtgtataatggaaatattccctgcattatacagatgagggaacagtctcagagcagcagcatccctcactccacgcccccagtgagtgctagaaggggtgttgcactcgggccaactcttaagttttgcaaaataaatgacaggcctgctgcagtggctcatacctgtgatcccagtgcttcgggaggctgaggtgggaggatcacttgagcccagggggtggaggctgcagtgagctatgattgcatcactgcactgtagcatgggtgaagagtgagatcctgtcccaaaagcaaaacaaaacaaaaagacagccgtggtcgtttgtgctgcgtgctgtgctaagcacacagtttatcttaacccttacatagcactacaggtagagatttcattgcactccagtgcctagaacagtgtctggcacacagcaggcattcactcaatatttgctgaataactaagtgatgcccctcccacccttttagagtggtggaaacaggctcagagaggctgagtgacttgcccaaggacacacagctactaagaagttgaaacagtttgaacccagacagtctggcctcagagtcagcacatatagaggctgagccctcagcccctgaccccaccttggggacccaggtctgtctctctcgtgggaactaggcaccctcgtgtgggggctcacgttcgtcagactgagtcctcagtgacttttcagttagaggtgtggatccccatttttactatcagggaaactgaggcaggtgcttgccctaaataaggtgcaagccgtggagcagatgtcacgatcaccaaagcccatcctccccttttttaaaaaattgagaaagggtctcactctgtcacccaggctggagtgcggtggcacaatcatagctccctgcagcctcgacctcccaggctcaagcgatcctctcgcctcagcctccagagtagctgggactacagatgccaccacacctggctaattttattttattttttgtaaagacagggtctctcttgtgttgcccagcctggtcttgaactcctggcctcaagcgatcttcctgcgtccttggcctcccaaagtgcttggattactggcctgagccactgtgcccagcaatagggccccactctagaagtcccaatccctctgtgcgccccagccgcaatcaggagactttccgaacaggcacacaggaggccatttttaaatgaaaaggaaacgtttattttggtggggagtgagggtgggtgggaagggggcatgacactttttctttggggagaggggggtgacatgcggcagcttctgcattgggcggttcatgcacccagggtgggcgtgggggaggcttggggaaggggccacgccgacccctccctccctgccctgcgggtgggctgagaagacccgccattagcaccagagttggacgatttgcagacctcccctccccacactgtctccgaaccccgcccccatccctgagagcgccccctcaccactccccccaccagcgacaggctaggcccgccccgcccacatttgagtgagagaaacttattgctctgtgtgtgtgtgtgtgtgtgttggggagggtgagccgcggagctcaggaagaccccccgccattcattcctccccaatcgccccgccccctggcccgtgtccgtgcgttcccggagcgcaggaggggtgcgacatgcgtgtggggggcgcgtcatgcagcgcatgcgtgtaggtgcaggcaccctggcggccggggggaaaagggggagccggacttggaaagagtccctttagctcgctctctccctccccgaatcccacactattgacttgggggatggggtgggaggggaggagaatcacgttttgtagaagtttatcatgattgtggttattttgaaaagctgaactcaaaagctgggtacgtgtggcggactggcgagcagggggagacgttgggaagaggtcagtaccctttggaaaagaccctcaccccctttccccgcctccttcggctttcgtgaaggtcaggggaaacgggggggcttgttaaagaagttgaaccctttggcaatataatcagtccccaccccgtaccctggtgtctggagcccctagccctttgccccgcccccaccaaaacccgccccacccctcacccctgcttcaccagggtttagggtccgagggaaggatgggggggactcaaaatgccccttgcataggaatcgttgcatcgagaatcgtgctcagtgacgccccccatccaccctcgggtggggggttcctgaggccgtgggagcagagggagggaggtggctaattccgtgggaccccggctccaaaaggggggtccgctaaagagtctgggaccggtgtggtctctgggcttgggggaggtagcgcatccttgagccaggataggaggtgggaaatgattttccacccgcgagcgtgacgcggtgaggaccgctggggaaggggggctgggatcccagccgagctgggtgttgtcggttcccaatcttctgatactccagtgttcctcccttcgggaacagcctctgtgatcatctgtggactactttaaatggaaacactcttaacctaaataaaccgtgtcctagccaagcagcgatgcctgcacttatcggcttctgtacaaaatgcgtattagagacaaaacttttaaaacaagtgtttgtcctcatactgcctcaaaccttagcacaccaccaaaggtacaaatacaaccctctgggaaacactggtgtctgtgaagagggtacctttggggcaccatctcagggaagagactcagggttaggcgtaagacaaagagggtgcttggggagggtctggttccctggaattgcagacaggttgcgcctatcttggaagttctagcatcaagggaacctgggctggacaagtctgttagggctttggggatatgggtgcggaacaggcctgaggctttgggggtgtccaagaaatgtcagttgtgggaaggatttggagcatcccaaaggctgaatttgagctgaaaagagctgggtcaagtcttggaggtttgagaagtgctgggacgcagttcagggaatttggtgggggtgtttggggtggcaggagtggggagggagggtggttcagggagcctctgtgtgcagaggttaagtcgcaggagtgtgtggggattgggagatgtggcgtgccagggtcagtctcagaattctgggtgcaggtctcatgtcctgggaatggagggagatagtcggggaatttcgtgtgctagggccagatcatcccaggaattctgggataggaggtctgagtccatgcagcaagaatagaggcgagcaggtccctgggggaaggggcggatgagagggtgaaattcaccagaggaattctcctaaaggctgagggagcaggtccaaagcccgccccgccctcccaccacctgagctcaactcggccccgccctcccgccacctgagctcaactccgatctggggcttgggtaactgttcctccttcccctacactgtttctagtttctggtttgttttctcctaatcaacgcacagggttggttgtcctcctggggtgaaggatgggaaggctggagaccttaaaggccagcccgacccccgggaggtgccacccccttcccagagtgcctgcccctcaaacccgcgcatgcggcccctggcggcttattgctgaggtggacttggagtgggggctccaggttagggaaggcatgcagtgtgtggggggaggtgccccaagatgtaactggcataatttggacttatttacacaagttgatggcagggggatgtcctatggctcgtggagacctgagaaggctttttttggggagggaagagttggggggacgggctgtggcccctctctccatcctgggggcccaggttgggggtgaggggcccgggggtgtctgctggcatcgtcatctcggttgcatattattaatgactttttgattttttttaaaaaaacccttttccccaccccccacccccagctcctttgaccttcttcccggtcacccccgagtccccccacaggggggaggggagcgctaaaggatggagggcagggtcgggggagcgcggcgggcggcccggggagagccagggggggtggcaaggggcgcgaggcgcagggacaccccgctcaggcccgcgatgctgctgaggctgcgggatttctcgtaacctggggggtggggaggtgtgcagacacaggggggaagcacgaagatggggtgcagggaagggtcagacagagagacccaaggcagggagaaagagacagagagagaaagaaatggaaggggaggacaacagatacccagagagacagagaaggcaagacagacagagtcaggcagacagagacacaaaaggacggatgacaagagacagatggacagagatggaccaaggagatggagagagaaagtgaacaaatcggggagtcagtcaacatcgatgagaaagggggagacatcggggaggggggagagactccggattaggaggcaggttggtgcccaccgagcctcccccgccccattcccaccacagtccaccgcccttccccccctccactggtcccctcacctgaggcaaaaggtggggggcagcaaggcgggatggtgggcggcaggggcgtggggaggggctgggtggaatgcatgtgggagcagccagcggagagggcagggaacggtgcggccgccgtagcggggctgggggctgacctagttgtagggaaagagagcaggcagggggtggggtctgcaagggggctgagtggagcgaagctggcagtgcccttggggaatccgatgagaactccaggagcagtgggggggggtggggggggagggaggctcctccagaagattctaaggacggggtcgggggtggggggcggtgaggcggagggctggggagagggacatctttaaagggtccaagaaggctctgagcttctgacgggtgcgggaaggctctcacaggcatctcacagctaatgggactcaagatccagcaacagtgtgtgtggtttctgcaaagcctggggctgcctgcagggttctgcacccccgcagggagctctgtggcttttccaggcaacgctaagggagctgtctggacaaaaggtgtcttgatcgtaggagggagggcttggggggagatttgaagcccagtgtcttggggacaccccctcccagccattcccaattgctaacctggggggaaggggcgggggggaccgaaagtctcgcgaggtctcaggcggtgacaagagctggggacagaaatacacagagtcacgggggtggggagaggatggtcaggggaaaccccccaacacagcctcactgttggggggatggagaaacgccgccgggatcatttcctcctctctggtgttttccgcgggaggggagcagtgaaatggggggcggctgagacatcaaatatggaaggagcttccgggctggctggggagggggaggggaggaggaaggatgggaggagggagagttctggggaggagtgggagccagtgatcaggtgagggcagatgtaggagggaggagcaggggtggaggacaagcctggaggaaaggagggtcttgggaggaccataggggacaattagggagggaagaagcctggcgcagtggctcagacctgtaatcccaacactttgggaggccaaggcaagcagatcacttgagtccaggagttcgagaccagcctggccaacaaaaccccatctctactaaaaatccaaaaattagccgggtgtggtggcaggcacctgtaattccagctactctggaggctgacgcaggagagtcacttgaacctgggaggcagaggctgcagtgaaccaagattgcgccactgcactccagcctgggcgacagagcgagaccccatttcaaaaacaaaaacgaaagggttgggaagggaaggttgtggtaggagagactcttgggggaaggagcatggggggcaataggccaaaggggtcttgtgggagggagggttgtggggctgaaggacagcaaggaaaaggcttggggagggctggagggggaaggatccagggcaccagggatagaagcttcagccaaccccatcagctccagccatgatttgagttcaatgaatggattttggcatcataggcaagagaagcagggacctcccccacccagccacccccaccccaatcctccctcacccataggcccacaccctctccccctcaatcccataggggcccctctagacctgggggtggggaacagaggaaggtaaaggactgggagtgggtgcaagcagggggaggagttagataggagcagggaggggagtgggggggtaatgagctggaaatggacaatgacggggaggttacaaaaaggagaggtgggggggatggaacaagaggagccagacagtcccccctctggactaggagcccggaagcctggggtctcggcccttgtgctctgtggcctggggtggtgggttggtcatggccttccctgaatgtctgtgaaacacaggggtttaggtgaggccattcctggaagccccccaggttcccctatggcatctccttaggctgtggacagggatcctttaggatgtgtctctgcatttctaaagaagattccacagacggctgttgaatgaatgcatgatggatcacataccttcaggtggcttcccttcacgtttaagataaagtcccgcctcctcaccatggccgaaaatccgtcctgatctttctccctggactccagcagccctctccccttggccactgggatcagcctcactgtgctccttgctgtcccttgaacaagccaagctcatcctccaccccctcccccagggaagctcagggcctgtgcacttgctgtttcttctgcctgcctggcccttttcaccctccaggttctgtgtcacctcctcaaaaagtcctttgcagaactccttttcttcccccagagatggggtcttactctgtccccccaggctggagcaccatggcacaatcatggctcactgcagcctcccagactcctgggctcagacagtcctcccacctcagcctcccaagtagctgggtctacaggcatgcaccaccacacctaagttttttggttttgaggaaatggtcttgctctgttgcccaggctggtctcaaatttctaggctcaaatgatactcccaccttggcctcccaaagtgctggggttataggcggcagccactgtgcccagccagacctctttaactgaagtggccagagtaatagtcttgttcttttatctttatcttaattgcttcttttcttcttcttcttcttcttcttttttttgagagggagtctcactctatttgtagcccaggctggagtgcagtggtgtgatcttggctcactgcaacctccacctcccgggttcaagtgattctcctaccccagcctcccaagtagctgggactacaggtgcccaccaccacgcatggctaatttttgtatttttagtagagatggggtttcaccatgttggccaggctggtctcgaactcctgacctcaagtgatccactgtcctcggcctcccaaagtgctgggattacagatgtgagccacccccgccgcccagccttaattgcttattttctgcttcttcctatgagcggctggaaacttttcctgtaaaaggccagatagtaaatctctttggctataggggctgtatagtctttgtcccaattattccactctgctgtcgtggcttaacatggttgtgttccaataaagctttgtttacaaaaacagatgctgaaagatcaggccctcaggctggagttagtttgcggaccccttacaatctggagactgtaaaccgtgatggcagattcacgctttgttttatcccaaatttgtagtgcctgcaactgtgttctcaagaatcagttgtggccatgggtggtggctcatgcctgtaatcttagcacttcgggaggccaaggcaggaggactgcttgagcccaggagttcaagaccaacctggccaacatagcgagaccccaacacttgaatccaggaggcggaggttgcagtgagccgagattgcaccattgcactccagcccaggtgacatagcaagacagtctcaaaaaaaaaaaaaaaaaaaaaaagaatcagttgctgaaacagtgaatgaatggattgaatacatgaatgaaaggagctaggagttggcttggattgttacaaggattaaagaatatatgttaaattcctagcatgtggtaggtacttggtgatatttgctgaatgattcgtctactaaatagcaccactgtcttatccccctcacttctgcatggccggcagcccccagtctgtcccttctgatccctgaccccgactctctcggcctcgtcccttcctctccatcctcacagccctggccccagctcacgcttccacctgtcacctcagcctcctaacttccagcctcccacctccagtccatcctcacaagaccccagagctgcccctcccagctcacctgcctcctccccaagcccctagacaaggtggcagcctctcagcccggtgcctgcctcatatctacctgagaatcctccctccacagtctagtctcctaagctctgtcctgcggttcccttcaaccgttcctgtcgatgggatttcttcctctgcgtgtggtcagaactcctgctcaaccttaaggccccactgcagatatcgagtcttccctgatgcccggccccatcccctgggagtttctagtgttcctctcactgtctgtgctccctccattttagcatacatcgcctcaaaccatgactttctaggtccgtgtctgcctcctgctccaaagcggaagctcctgggggcatggtttttgttcacggttgaactccccatgcccagtacctgggatgcgtgggtgctgtctaagcgctggctgaattcacaggggcatggacggatggctgagcctttctctccccattctgcacccagaagtgttctgggtatgccctccgttttcctgattgaatttttaaaaaaaaccctaggaccaaggagggaggcagagatgttgatgggggtgaggatggggtcggtcgtgagggcaggtgcagtgtgggaggcagggttgagttagttcgggggttagtgaggagcagggtgagtcctgggtaggtgggtgtggggtcagtgtcaggagctgggggttaactgggtgcagctgcttgcagtgagggggccgaagtctcggtcagtgggggctgcatgttctcagaagggttagtcaggcaggagtggggagtctgggggtccgggggatcagagggtgggggctacttaccccggggggagggggttcgtccactagggggatatccaggccgcggcgttggcgttgaggtcgggcaagaagcttggggggcctggcttacgccagtcttgggggggcagtgggggagcaccagtggctgggggtgggggaagaggccagagagttggggggaatggacatggaataaagacaggtgaagggtcagtggtgaggaaacttggggcgggggtacagggaagatctgggagggaggcagtttggggccaagggaagggggaagggaagtccaccgcctcctcccccatccccctctcctccctcccctgggcaggggagagagagggagggtcccaggggatcagtagggggggcacctcaccttttcggatggagccatcaggggaaggggcatagtcggtgaggaggaagcaggctcggtcccggctatagcggccacggcttccaggcgtgatggggctcttgtcttccggggacatggcaggctggtcaatggctgggcagtcctcgtgggcaagcgcagctgctgccggatccccattggggcgaggatctgcatcccaagggggtcagacagagagacaaaggagagagtgaggtgcggtgaacacgcggtggggcaagatgtctgcgaggagcagatgctgggatggtcggcggatgtttggcactggaagtggagattcaagggcagggtgatgggaaggagtggccaggagggtggcagggggcacagctgggagagggtatcaagggggcgcggctggggggtgatcatgggggttgagtgctgggaagggcgactgcagttgggaagggtggtctggacagggagttggacagattgtggtggtgcagggaggtgttgagagctgggatgtggtggtggtgccaggtgtggggtgccaggaagggtaggactggggtgggatgctgtttaaagatatggtctggagctggccacattggctcatgcctataatcccagcactttgtgaggctgaggtgggagaattgcttgaggccatgagtttgagaccagccctggcaacatagcaaaactccatctctacaaaaaatagaaaaattagctgggtatagtagtacacgcctatagtcccagctactctgcaggctgaggcaggaggatcacttgaaactgggaggtcggcctgcagtgagccataatagtttcactgcttcagcctgggtgatagagtgagaccctgtctccaaaaaagataaaagataaaagatgccaggcgtggtggcttacgcctgtaatcccagcactttgggaggccgaggtgggtagatcacttaaggtcaggagttcgagaccagcctggccaacatggtgaaaccccgtctctactaaaaatacaaaaattagctgggcacagtggcgggcgcctgtaatcccagctactccggaggctgaggtaggtgaatcacttgaacccgggaggcggaggttgcagtgagccaagatgtttccactgcactccggcctgggagacagagtgagactccgtcttggaataagaaaaaaaaaagagagagatggttgcggatgaagcaagctgggtgtcggggagaagatgaggcagtgttggggggtggttggctggagcaaacttcagggggcttggctggggtaggggtagcgggtggaggcatggctggagaggatgtggcaagctaggaagtggctgttcagggaagagtgctgggctctgggaagggcaccaaggggaagggctaggttaggtgagagatgggaggtgggacgtgggggtcccctaggctctgactccagctatttttaactggtgtgaaactgggtcagcggctgagggagcaagatgggggccaagtggcccagctccctttcttgacctacttaaggcggggcagtgcaggggggggccaccagcctctccttcctcctagactcccaagccactgcctctgaggcatagacaccccctgggggaggaacacacacagaagcacaggtaactttcttctccctcatctctcgcttgtctcttcctctgagcagcacctctctggatctctctttgggaccctcccaggctgcccacagcaaagccgactgaccaggccctggtttccgttctgccctgggggatctgccctggcctgactctccgttttgaagtctgtctgcctcttgggcttgctgtcattagaacccaaactctctgccgctgaccgcccccacctccgcccaaaatctacatcccatctctctctggtctccatgacaatctctcggtttctgactccccgcctcagaccctatcggcttcagtctctcttccctcagggctgtctcccggatgctcagatgctgctacgttccctggggttctgcctcgggtctgcctgtgattcctgtgagaccctctttctgtgtctctctgagccccacgctcctccgggtccctctctctgcacagctgatgacactgcctctgcctcgccagcccctctgaatatcttgcaaatctgtttctccccaaaactctttcccatgaaacctatgtctctgtgtgattatctgtgcctccttcttcgcctgagctcctgctgttggtttttttctccctcacctcttcgacgccaaccaccccaggttctctgaaccccggcagctacctccccagtcctccccgggtctccacctgtgcccccgatccctgacgcccaggctcacctgcccggttgatctcaatcacctcctcctgagccaacgggcaaggctcgccgggggctggcagaggaggcagccccatgatccccagcccacccgctccccccctgagcagcccggggtgcgtgtggggccccgctgggtaggccccggccacagtcacccccatggagggtggggtgatgggtggcggcgggctgatgcccccgctgccgtggtgcgggtggggcgggggtggcgggggtgggtcaggcttgcagtagttgggcgagcccggttgcgggggccgggggatgtgtttgttcttcttcttgggcagcttctgcttggccatggccagcgaatagtacatgccaaagttgttgacaatgacgggcacaggcatggcgatggtcagcacccccgccagggcacacagcgccccgaccagcatccccgaccacgtcttggggtacatgtctccatagcccagggtcgtcatggtgaccacagcccaccagaagccaatggggatgttcttgaagtaggtgtggttggagcccaggatgtcatcggggtcggcgccaatgcgctcagcgtagtaaatcatggtggcgaagatgagcacccccagggccaggaagatgatgagcagcaggaactcgttggtgctggcgcggagcgtgtgtcccagcacgcgcagccccacgaagtgccgggtcagcttgaagatgcgcaggatgcggacgaagcggaccacccgcaggaagcccagcacgtctttggcggccttggagctgaggcccgagaggcccacctcgagatagaagggcaggatggccacacagtcgatgatgttgaggctgcttttaagaaactccaccttgtctgggcagaaggtgatgcgcatgaggaactcgaaggtgaaccagaccacgcacaccccctccacgtaggtcaggaagggctccgtctccacctccacgttggtgatgttctccggaggtgccccggggatcggggaggcctgggtcaccgtcttgttgctaatatggatgaagccctcatgggtttccaggcagaaggtggtgatggagatgaggatgaagaagagggaggcgaaggccacatactgcagggcagggagggagagagagggggagaggtgacctaggcatcaggttggccataacatccagaagacccttccagtgcccccttccccagcctcctgggcccaaactctgggcaaaatccaggtgtctcagccctgtggctccatcacttccagaatcccattctcccctctaaagctagcaaaaagggagagaaaggaacagaggcagttggagaagagctggccccagcagacgcagcagatgggcagcttctttccttggaaacatttctggccccttgctgtttcctagaccacctccccccaccctcctgttccctgtgtcctatttcagggccccccagcagggtccacgggttctgctgtgggacgggagccgccaggcctaagatcacacatcctgtgtgtctcggaggctttagggctcagcttggagctgggcagacgggaagggagaaggcgggcagggaggcagaatcgtgaggtggttaagagtcggcgagcctgggcatgaatctggcttttaacctgtcaaaactgggcaaggagactgagctttctgaaccagaagtttgtagtgggattgttgtgaggattaaattagatgagcgtacgaaggacttggctccaaacacagtgcttggagcagtgcctggaacacagtaagaagacctgagctgttgttagggtatgcaggcagcagttagttggggggcaaggtcaaggcctcacccagagaggacagggcagtggtggtgccacagaggggaggtgggggtccgggcccttaagggaggaggggttgaagggttaagcctgcaaaaatggaagaggagataaaagaggagagtcaggcagggtttagggccctgaagaggaaggagagtcactggcctggacattgtgggaaaaggcagagccagggccaaagagaagttagggcatttgccaaaggggcagagaatgaggggtgaagggtcctgagccatttcaagatgggggataaccagagtcctgccacacagtgatgtgggttttgatgaaggcctagaagaggagggagtggggtcagggtcttggagaaggaaagcaatgggccaggcccctagagatgtcatgggctttatcagatatgcagaggggtgggaggggagaggagtgcattggagagggaaggaagacaggtgttatagtaaagagagggttttaatcctgcgggtagtggaggagggagggcatggggagttttgctattaatcaggggcacagagcacggggaggccactgctggaccacagagaggaccttggactttggggtgggccaagggccagcactgtccctctgtgcaccccccttcctccacaggggttgggctctgggcttgacttcactgaggtgcagagctgggaagtagtgggtggagagtttcggggccacagagaggaccctggacgttggggtgggctgggggccggcgcaggtcctctctgaactccccccccacccccaccttcgcttctctgcagtggtttaagaggccagaggccttcgcagagcgcatgcctagttccccgccccctccgagccgggcgcgcggcgctagctgcggcaccgcagtgggggcgggccagccgggccggggggcggggcgcacggcggccagtaccgcggacagctcccccgccgcagtgcgcagccgcagcggctaggggccgtcttaaccccttccgggccggagcctattcaacgcgcagccgcagtgttgctgctttccggcgggaggccaagggccaagagtctaattaactccttccctcccagggcacagggaaaggtgggcacccgccgcagtgcgcagctgcagaggctggacggcgtcgggctggtttaaccccttactccagagtgtgtcaaaagcagaaggggtaggagggcatggagtctctgtaagaaggaaaggagtgattacgaggaagggggcgggggcagggggctgtagggtcggaccctccactttgctttggcctcagctcccaactctctcaagccatatcactgggaggctggaaagggctcggcacaccttggacacccaaaacacattggcggagtaaatgagtatctcccgtagctgtcccgaacacctagcctgaccatcacagaagaactctaacttcatcccgctcctcatctcagcacccttcaatggggtcacaggagagaagggcgccccggccatgggggaaggagccgctcagtgtcttgagggggcatccagggccatgtcccttccgcacctcctcttccccacctccccccatccaaccccaaatctcgccaactcagcgctttctggggaccaaactttatgcggtggctccaggcgtccccccgctccctcccccggcgcgaatgcggcactgcggctccgcgtccttcccggctcaggacgcggcacggtggggggagggggccaagacctgctcctctgtgtttgggtacccaggagcccaggagggggtcttgggatcgctcttatttcccccatttccaattgcccccattttgcactgccccccttttccaccacattctccctccggggtccccgggacagggaggaagttagtaggaggaaatggttcaggagagaacccagggggagggtagtcatttagcctaggaagttatggatgcttgaggaaagttttctgggagcgatggagagagctttggggaaaatctagaatttggagagagagagaaggctctttggttcactttgatggagggggacagactgaggggctaggttctgggttttgcacggcggggggggaggttcgagaaaggaagagggcaggtggaaggaatcccagggcaaggtagaaagaattgtaagttattttgagatgaaagttttagggctgatgacttgaggggcctcccagggtttgaggttagaaaaagttctagagcaggagggaaagtcacttagactaggaaacgggctgtgggggctttggatggggggagtcccagggatagagagtgcactgtgcagttaaaatgatggagaggagaagctgcgaggatctatggaggaggaagaacaattctggaggacatgtgagggttctggagaggaaaggcatatgatgggggcatgggatgcttctggaggcactgaggaggagtgtgaaaggcttgggggaagtctggagctttatggggaaagtccttgagatgggagttggcgtggaggttgaagagtgttaaacacagagtgaacacagagggggcctggaggttccaacggagaagatgccccaagactcagtattgcagtgagggggaggtgaaaatgtccaggcaagaacaagtggaggtttagaggggtccagaaggctgtgaggttggggtgggggagttttctgagactctgagagcagaagatactgcaggaagggagtggaaaaaataatcagaagattcaaacttggagagagaggtcttctgggagacgggccacggggtgaatcggggaggtgctgggagagactgagagttgaatagggggccccagagagtctggagaaggcagggaaagtgggggtcagggctcacagggcctaggagaatttgagggctgagaagggatgtcttctgaggggctggggaaggtccaagaaaccaagggctggacggtgaccaagagtagtgagaagagatttgatggggcccaggagacatgagggttggggagggtctcagaggagcccaggaaaggtggggaccgggttgttcagagaagcacgggagattcacggtctggaggaagtgtctaagcgtctagggtggccttggcgggggagggggaactttggaggggtctggaagagcccgaaggttggagatccgtctttggaggatctgggggatggctgcgagaggggggtgtgttcggaggagcccaggagactcaggattggggaagaggcttctaggagactgagaagcctagagggacccggagggttggagctggggcgctcctgggagactgggggcgcctggagaggcgggggtggggtggatgggggccccgagagcgcgctcaccctggcagcccgcgacgagtaggggtcctcgaagagcgcccacacgcggggctgccagcggcgccaccatgtgccgcccgcgccgcccgcgccccctggcggccccccggcgccgccgcccgcgtcctggaagcagaggcgcttgagctcgccgcccgctccgtccaggccgccgccgcccgcgcccgcctcgtcgtccaggcctccgtcgtgggcgcctgcggcgttggcggcgttggcggcgcccgcggggtcgggcgcctcgaaggagtcgagcgcctcctcagcgtcgcgatgctgccggtaggtcatccagcagcaggcctccacgtcggtctcgtcgatgccccagaagccgagctcctcctcaaacaggggcccgcacacgtcggctgggcagtgcagcttgccggtgcggtagtagttgagcacgtacgcgaagactcccgggtgccggtcaaagaagaactcgtcggcgcccgggtcgtagtcgaagcgtgccgccgcctcgggctccgtcaggccggccagccgcgtccccggcagggtgcgcagcgtcgagcggtacgtctcatggcgcacgccgcccacgttgatcacgatcttgccgctgtcgccaccgccgccgccgtgccgccccatggccgccgccggcagcccggggcatggctcggcgcgccggtccccgggcccgcggggtgccggggggcccgccggggacgcggcggggccgggctgcgcaggctgctgctgctgcggcggcagcggtggcggcggcggggactcgggcggctgcggcggtggcgccggctgctgcttgctggccccctggcgcccgcggaaggacgagacgcagactgagctcagcattggacggggggcggggcgggaggggcggggacgcaggggcggggacacggggggagagaccgacgggattgggtgggaggaggagcgaggtagcgggggcgtggcttaggggagaggaaccaaactgattggcctgggggaggtggggcggggctgtggctgggaggagtggggcgggcactctaacgcgacccagctggacgagtcggggccgccaatgagacggagcgattggctctttctaagagagcagggaggaggggcggggcggggcgtcaagggaggcgggaccggttactactaattgtgttcggcagcactggtagccaggggaaggcggggctagatacgatagagagagaccttactgaactgaaaaaagtgcgggcggggtagagggaggaggggacacatccaagctatttaaagacgcccgactggcctggaggggcggggccaccatgagagaggccgtcctgattgggctgagaaaggggcggagagaaacaaaacagatcgcacgccctcacctaaaacaccgctaggcaggacctggtggggaggagcattgcttggaagagacagggccgcagaaagtagaaacggtccagatgagactgcatggggcgggaactagagatggaggactttcccgcgcaagggggacaggctggactgaaagaggacacgggaagaacaaagacttagactcggtgagaaggtgttgaaacttgagagagtcctggaaacccgagagggtctggataggcctaagggagggagcggggctgaggctccaaggcgggcctggttagtcggggctgggcccggagaatgagtgtccggatggatgagtggtactgaggaaggtgagtggggtcgacaaatagaaaacgtcttgaggcagggcgcagtggctcacgcctgtaacgccagcactttgcgaggctgaggtgggtggatcatttgaggtcaggagttcgagaccagcccggccaaaatggtgaagccccgcctctactaaaaatacaaaaattagtcgggcgtggttgtgggtgcctgtagtcccagctagtcgggaggttgaggcaggagaatcgcttgaacctgggaagtagaggttgcaatgagtcgagatcgcaccactccactccagcctgggcgacagagcgagactctgtgtcaaaaaataaataaataaaagaaaaagaaaacgtcttgaatgggcggtaggaaagagagactaaggaaggagcggggcttgagggtcttgaaagcaaccagggtaggcgagggcagggcagggctaagggagggtagaggaacgggagaggtggatcccaggggaacaatgagactacaaagagtacaaagctactgggctggatggaggggagggacctggaacggggagtcttcgggatcagaagacctgggagagggcactgcctaaaggtcacagggtctcaaagggcgaggcgagaacttctaacgaacgctacaccgcggcggactgcagattggaggaccgagggtagatgaggactggtgaggagggggcacgcaaggaggcagagaggacgggagaggggagaggccaaagcgccaggaagcaccgtcaagactgaggcaatataggcaggaccgataaaaaatggggtgggctaggagtctcagaggtcgggttctggggaagaatggagtgaggggcggggccagaaaaaggggaccgcctcggagcgggccgtccccgccccctgggcggtcgtaggctccgagaggcagagcgcaggctcagggggctggggcggggccagcggctgcggctggggctgcggagggaggaggcggcgcctgcgggagcgaagggggcgggtcagggggctgcgggcgccctcgggcagcacagtttctggcccgccgcttcctgctgcaggtgcggcggctgattcgtatcgcctcccaaccccatcccacccccgctcccgtttctgggtttcttggcgtctctttttctcccttcttgagtatttgtgccgccgtctctgttcccacccctctgagtctccgacccctcgtttgtaaatctgccctcctgggtctctgattctgtccccctccttctgagtctttgctcctcttctctctaggcctcagtctctcctccctggtgtctcagtccccgcccccccaccccagctcccccgagtctctttctcttggtttctgtaccattttatcaggggtgtgcctctctgtctggggctctgtaccgcactccctgggtcttgtgtccctgtcctctactccctccccgcaacccgctttgtcctgcctcctctctgggtctctgccctttcatctgagtctgtctcctccttgctctctgacaacctctttcccctcccccttcttcttccccttctccccatctctggtgtatttccccctccttcttccccttctccccatctctggtgtatttccccctccttcttccccttctccccatctctggtgtatttccccctccttcttccccttctccccatctctggtgtatttccccctcttccgtctctttccctcctctgtctctgctctttctcttgctggctctctgttcttctctctctccctctaagtttctgcctcttcactttctctatgtcccctccctgagtctctattcctcctatgtttcaccttcttctgggtctctctctttctaggtctctgtctccacttcctggggaccctgtccccctctctctgggtctccgttcctttttctcagaccccccatcaccctctctaacccccgtcctagctgggactgcgtcactgcagagagagttgcagaagtggggcctgtcctgcagcccaggaaggtcgttgccctcactccccagacccagggctctccattgcacccaatccatcatgtccttcagcttctgatggaatccaagagggcacagaaaagacataggtacttcctaccccttccccgaattctggtgcacccccaggcagaagcagagaatcctgaggtgagggactgggctggggctggatgaggctcctgggcaattgggggtggggtggtggaggcaggagcaagggctgggtaggcactatgggctaggtaaggacctcggtcgccatcctcctccacactcccccctcaaccctgcttttcccttctgcttttcacagcagccaggcacggtatcaagtggctaaatcagcgtttttttgcagaggtcagaagtgtgggagaaggtgggggctgtggggaaaaggggctggaataaggaggaatgtgcgatgcgactcaggattagaggccatgggaggggaagaggcagcgggccgggagtagcaggctggtccgtccacattccatcaggccctgggaaacttggatgccagcactccctcatggccctccacagaccccaccagggtctatgggaggatttgtgagcctggagtctccacccacccattagagaggagggggcttctggaagcttcatgagggctccaaatactggacactcagctatgttcacagaccaggaggaagtagactcgactcttgactagggacaccaggaggggagaggccaacgtctgtctcgttttcagttcctttccccacccctgctcctcccaatccatccgttcccaggccctcaagacacaaaattcctgaaagctccaactcccatctacgtcatcttcggcgtcccctgataaccctccctcccccattaccccaggccctggaattggggaagggtcttccctccctgacttctacgaccccttccttgttcctctgcccccattcccacccggttccattcggagccttggtctctggacaccaaaggtgaaaatgtgaggactctctgcctacgatccttcgtcccctaaaaccctccaagtaccttggccccgaaagctcagagtcgaggggaatctccccgctataatctttgggtccctggatcccaagtcccccgtctccaaaactaggattcgggctgtcttaccgcccccggaccctgagccttcgccccctcccccgtactcaccccaagtcgaggcgaggtggggatgggggaatccggggctcgagatggggggaggggtgacccagccccggcagctctgggcagcaagaggctgcagaggggggagtgacatcaccgccggaggaggggcagcaccgctcccccaacccaggggcttcaagctccgcctttatggcggaccccggggtcctggaatgccaaggcagagaggagaaacaggagacgaggtccgagggaacggtatccccgccccttagaacaggaactggtaaacccttaccaattacagccacccccgactgccacctgtggctgccgtcgcgacctgtcgcctcccacgcatgttgtggctgcgcccgcccccgtcagggcgtgaccacggcgtggactacaacgaccgtgatgctccacggagccaggagcctttgacgaaaggcagcgtaggcgagggccttcatgggactcgtagtacaaggcccatcacaagggtgcgccgtggagaaaaggggtgatacccttcgcctccctctcttcctcaactccgtgggtccatgcacaaagctttctcttcaaaaagtacgctctgaaaagaagcaacctaggcaggttcgttcaatggaaatattggatttttactgagtagcgctagctctgctacccggtgcgcatgcgcatcacctgggcggcacccgcggtactgcgcctgcgcggtctcgcgccttcccaggtccgctccgcgagggcgagcgcgcgccagtcccactcgtgcgccgctcttcatgtccccgcggtcgaagacggtcacatacgcccccaagaaaacgtcgccgaggatccacacaggtactggaggcgaagcgatgtccaaggcccggaagccggacaagcagaggcggacgtcaccctgagcaaactgcaaggcgacaaggcggcaactgggtgtccaggccgcaggaaccaccatttccctgggagtccgtgctctctccgcccccaaccccggggacaagaaatgtttctgtggccccttccggccctagtgatgtccaactaccagctccaccctctcaactccagtcatattacatcactgtggcgtcattatgacggacacctacctggatgacgtaatcctgggccgtgagattaaaccagacccccccaatgaggagtgagactgcggggagctttgggatttctgagcaccggatgatgtactggtggaggagaggaacaagtgaagatgggagattcctgctctgctcaaatcccgtccgtggctccccagtgccatggagtaatgttcatattgagcacctgggtattcagcaccgtgtgtggacagccctgttgcctaggctcctctcatctagtcccaaacaaaactgcattatcatctcccccaacaaccccccccccactcccacccctacttcaccatccactgagccacttagcatagacacttgggaagtatctttgcttcctcccaccactctctggcatgtcacttaagaagcccagtcccctctgtcctggatacgctctagctacctgcttcccatcctcaggccgcagtgttcgccatggaattgccatcatcttccccaggacacacccaccagagactgggacctcacctccccagccagcaaggggattcccccaatggctgcatgcagggcccggatctcctcagtgggtcctacgatgacaggtgtgcctgtatccaggatggcagcacagccctgggcacagagagtcagccgtgagcccaccttcacactgagggggaaggaagcagtcattagaggcagggtcctaggagtccaggcctccagctccagacccaggagaccaagtccctcaccgctccatgtggatctgccagtaggcggggactgtgactggcacgaaggtgaggggtgggatgtagtgtgccgggtctgagccccccaggaccagctctcctccatcagccacttcagggtccctgcaggggcagagtgtagaggtcattgtcgccagccctcccccgccagccctaggaatggccagggatgggacttcctgccaattgggtcatttttggggttctagttggggcagtggaatgcaggcagggccgagatgttgggactggaaacaagaaatgaagggaaatggtgcttttcttgatggaagttaggactttaggatgatggatacttcctgaagtggagaggagacttcttcatttggctgtggaaggtagagcttttgggggaaattcctgagctgaatatcatagtaaccaagcagaccagtggagtctcagaattggctcgaaggtgtgacttgtacaggagtggggtggcttcctgggaaggtgcatagactttctgaattgcctgttgtggtatctagaaaggtgttagacttcctgagctggctgagagtgatgggaacggggatggaaacttcctggaagatgtaaatgagtgggacctaccgagagctaggtggaacttcttgagtgggttggatgtcagggtaactgagtgggcattggactgtgtgtgatgggccctgggagggaaagtgaagacttctcgggtggtgggtgggacttctgagcataagattgaccttcctaccaggtgggtggggcttcgtgaattcaatcaggcatttcctgacttctggtcagtgttctcaaatgggatttgagctttatggtgaagagaaggttcctgagtatttggttgggtggggcatagaatttcctagtttgattttgaaactcagcatattgaactgttggtgagtttctttaatatgtcttaagttgtcacttaagctctggggcttatgaatagggttgaggtgtttcttctgttaggtaggtggctacttcctgaatgaagggtgggattgattttttttttttttttttttttttggagacggtctctctctgtcacccagactggagagcagtggtgcgatctcggctcactgcaacctccacctcccggattcaagcaattctcctgcctcagcctctcaagtagctgggattacaggcatgtgccaccgcacccagctaatttttatagttttagtacagatggggtttcaccatgttagccaggctggtctggaactcttgacttcaggtgatcaatctgcctcagcctcccaaattgctgggattacgggcatgagccaccgtgcctgaactgggactttctttatggagtaagagacttcctgaaggagggcctcacttccttctgaggaataggactcatagataggtgcaccctccccagcacctgttgaagtaaaaggagaagacaggcttatccaatagcccctgctccaccagtacatccagcgggggccgaactccttccacagacagaatgggaaaaccgaggcccaatatcccatcggggcgggaaacagtgaagaccaggctggattcccacagagcttccccgaaaatcacggatgcacccttgattccaccaatctaggggtagattgagatgtgaccagttacttttgggaggacaataaccacatgtcctgaggtctcccaaaccaaagcattaatcccaggtctggggacatctggacccaagcccccaactgcttagcaaactttgcctctggacttgagagaattcctatcccttcacccaggaacccctccccctccttgagaagccccatccatcggctcaggaagcccctgcacctcaagcccctccctaagccagatgatcttagacaacagggttctcccaggctcgaggcttcctggagtcaaaggccactcacagtcagcttgtcctcactcaggattccatctacccgcccagttccatactgaatggcaaacttggtcccactgggcttgaaggagctggaggcattgggattgaagcggtggtggaaccctaggtcagaagtcagagaggtgtcactgtgggaggggagctttccgaatgccttctgcccctttaaccttctgacctttgagggtgtcagaaaagaacagttcctcaaaaacctttgggaagctgaggcccagccccgccttctcccttcacccccattcagccttattctcccacatagaagctcacagcagggcacactgaagaagtggcatctcctggacgggacccagagattggaggagccagtgtcaaaggcaacagtgaagttttgtggaggcgttcccagcccaatttccccaaaatactgggcctgaggaggcaaaagaagagacagagtcaatgaagagtttggctcaagggcacaggagtgggggctgtgtagggctgtgactcacatccaggaatttggagagaggtaccgaggcaggcttgtccccaggggatggggcccccaacttggggagctctgctggttttccccatcccctcagtaggttcagggtcctgcgtccagggtggacttgacgaagagggatcctgtagggtatgaagatgatgagaattaggaagccgcccttcctggagaccctctaaaatagacttacccaaatggaatatgatgacaaattcaacatttccaaggcgctacaataggagtcattaccagaaaccctacaataacaacctccgggaaaccctagcacagaaaccatgatgacagatatccccaaagactttacaggaacaaaccatcccaaacagaacttcccaatggtatccaagtccttaaaataagccattcccagggaattgacattctcaaagttttcccaagaccctaacatgaaatctgacctttgcagaagccctcggatggtggcccttgcatgcttcagttcatgatgttggagactatttccccacccttgcggaaaaacgtaagcatcaaatcttaatttcacttttttttcctgcaacctctgcctcctgggttccagtgattctcctgcctcagcctcccgagtagctgggactacaggcgcgcaccaccacgcccagctaatttttgtatttttggttgagacggggtttcgcaatgttggccaggttgctctcgaactcctgacctcaggtgatccacctgcctcagcctcccaaagtgctgggattacaggtgtgagccaccgcgcccggctgagacagagtcttgctctgtcaccaggatggagtgcagtggtgtgatctcggctcactgccgcttttgcctcccaggttcaagtgattctcctgcctcagcctcctgagtagatgggattacaggcacgtgccaccagctaatttttgtagacagagtttcactgtgttggccaggatggtcttgatctctttacttcatgatctgcctgcctcggcctgagccacaacagcatgagccaccgtgcctggcctgaggaaagcttttctaagcatgaaggcaggatcaaaaatcatgggggaaaatattaataagtgtgactcaaaattgacacctgttggccaggcaccatggctcacgcctataatcccagcactgtgggaggcaaaagcaggcagattacttgagctcaggagttcgagaccagcctgggcaacatgttgaaacgctgtctctactaaaaatacaaaaattagccaggtgtggtggcacacacctataatcccagcttcttaggaggctgaagcgggaggattggttgagcccaggagttcaagtctacagctacagtgagctatgatcttgcaactgcactcccagcctgggcaacaaagcaagaccctgtatctaaaataaataaataaatacaataaataaattttaaacccttgtacttcccctctacatacacacacaaagctgtaaataaaggcaaggacaaaaaatctgggggaaataattataagttgtatattaagagttaatattcctaatatgcaaagagcttctacaaataaataacaagataacccagtcttgggagacagtttttcttgagtctctcacatgtctgcagagcactgacttgtcttttgaaggattttgtttagtgaacagccttggaagagagatagcatctctttctggagcaaagggaaggcaggcttatgatgccttataaaagatttaagctccctatgctcaaggttctattaatatcatgcaccacagtgcatgtgcaggtatcatctggccttcttcatttcatcttgtggaaacgggctcagaaaaataggccagctgtggtggctcatgcctgtaatcccagcaccatgagaggccgaggtgggaggattgcttgaggccaggagtttgagaccagcctggacaacatagtgagaccctgtctctacaaaaaataagaaagccaggtctggtagcacatgcctgtagtcctagctacttgggaggcccaggaattcaaggttacagtgagctataatcatgccactgcactccagcctgagcaacagaacaagaccctgtctcaaaaaagaaacaaaaaaagaaaaaagaaagaaaaaactggcacacgtactaatactcttgctactactattgctgggagtaataaactgccctttgtctctgacttgggagtcttgggtcttctatgagcagccatgaaactatggcaaactaacttcatagttcttgacgctcattaggaaaatggacaaaggacataaaattgcaaaagaagtacaaataaattctaaatacatggaaagatgtcatcaacagtcatcaaaaaaatacaaatgacaacagtgagaaaccttgtttcaccatacagattggcaaagaactgagaatacttattgttgattaggtttgcaaatgtgtatcaaatgctcgaaaattgtacccaccatttaacacaacccagaatttcatctataggagatcactggatgagtgcacagaggtgggtttatgaggctgtgcctaattttggaaactggagacagtccaatgatgaactgcctttgcaaaaactataagtgagaaaattaggacagtgaaagagatctgatctaaacaaccgctaccttgcctttaacttccaaactgcctttggtcattcctgggcttaggccaagctaactttgggagacagtttatagtttaaatggtaatagtccatccccaaaactaaaccacctttgtaaagctaatgaagtaccaccaggataggaggatgagaggagcatgaattctgctaaggtgcagacataaatgattaccagtcattattccagaggtcaaaatatttgcagcttccccaattactcctgcagattacatcactactgtagaacctgattggccttttgagactaagggtttttgcatttctggtgatgccacccagacctgccaaccagtcctgtggctccacccagaagcagactattttccaggcccctatgaatgattacatccttgaccaatcagcagcacccattcccaggcctgacaaactatccttgaaaaaccctggcctccaaatgttaggggaggctaatttgttgttttcattttgtttttttatgagatggagtctcactctgtcacccaggctggagtacattggcatgatctcagctcactgcaacctccaccccctgggttcaagtgattctcctccctcagcctcctaagtagctgggattacaggcaccaaccaccatactcagctagtttttctatttgtagtagagacggggtttcatcatgttggccaggctggtcttgaactcctaacctcaggtgatccacccgcctcggcctcccaaagtgctgggattataggcgtgagctgccatgcccacctctgatttgagtaataataaaactctggtctcctgctcagccagtggctcggcataaattaaactctttctctattgccgctttcctatcttgataaattggctgtatctgggcagcaggcagaaagaaccagctaggcggttacagtggccaacaatgggtacagcttagttctgctttggaacatacatagaatggaaccccatttgacctctaagaaggaggaagtagctgtctataccagtcattctcaaactttatttagcatgacccaaaatcacctacagcagtggtgttgggcaaatctttgtgtagaggctttgcaggccagacagtctctgtggtaactattcaaatctgtccagatagcatgaaagcaactgcagacaacagatgctatggaaatgaatgcgcatgctgactccagttttgttagagacagggtctcactctgttgcccaggctggagagcaatgacacgattgtggctcactgcagtctcaaactcctaggctcaaaggtcatcttgtctcagcctgccaagtagctggaatcaggcatatgccaccacatcctagctaatttttttttcattttttgtagagataagttcttgctaagttgcccaggctggtctcaaattcttggccccaagcaattctgcctcggccctgcaaagtgttggggttacaggcatgagccactacatctggcctagattccctttagcttatttgtaaaagggaaatagcacgcagggtttgaccctcaggctcagtgtttgccaagcccagactcagagggctggttcaaattcagatctcttaatttttaagtagatctgggatggggcttgagaatttgcatttctaacaaggtcctgggccatgctaatgctattggttttgagacaacattctgagactcactgttctttgcattgacttggaaaatgtccgtgatatattaggtttgcaaagcagatgaatagggaatgatgaattcattgaaccttacaccagcaacatctatactctcagagtcctgggagaatttcagattgtaaatccttacttattcaaagatcttactgaggtgggaggattacttgaggccaggagttcatgaccagtctaggaaacatagtgagaccccccatctctacaaaaaaagaaaatcttaaaaaaaagctggttaacaaacataatgtgcagtaatttttaaaataaattttatatttaatgatttttttgtagaaagagatggggtctcactatgttggccaggttggtcttgaactcttggcctcaagcaatcctccaggcctctgccttccatagtgctaggattacaggtgtgagccaccatggctggcctcatgcagtaattttttttttttttttttttgagatggagtctcgctctgttgcccagactggagtgcagtgccatgatcttggctcactgcaagctccgcctcccaggttcacgccattctcctgcctcagcctcctgagtacctgggactacaggcgcccaccaccacgcccgactaatttttttgtatttttagtagagttggggtttcaccatgttagccaggatggtctcgatctcctgaccttgtgatctacctgcctcggcctcccaaagagctgggattacaggcataaggcaccacgcccagcctgcagtaatatttttgtacccaattttagtcactccttggagcatgacaccctcactcacacctttgccctcacccctcatgactcagtctttgaaaggcacaagaacgagaagtggggaaaacactttccggaaaatacacccctccccctgcgaagagccccaaggggtaaggagaagagaagagaagaggggaagggagaaattggggaagcatcagaggtaaggtaggggagaacttcttgggtggggtccccaaaactggacttcttttttttttgagacaggacctcccttgtcgcccaggctagagtacagtagctcaatcatagctcactgcagcctcaaaaccctgggttcaaatggtcctcccacctcagcctcccaagtagctaagactacaggcacctgtcaccgtgcctggctgattttttttttctgtagagactgggggtctcactatgttgcccaagctagtcttgaactcctagcctcaagcagttctcctaccttggcctcccaaagtgctgagttgacagtggtgagccattgtgctcagacaaaaaaatagacttcttgaggcctaaacaatttggagggtgtgaatgtgggggagtcttagtttaaatgtcacatgccttggtctccaagatggcgggaatgtgtcacatgtctggagacccccataactggtcatcagagcttggagtgggatctgcagaggcctccaaaaaaacatatccagagaagaaggggagggttcctcactcaagagtcttagtgaaggccgggtgtggtggctcgcgcctgtaatcccagcactttgggaggccgaggcggacagatcgcgagttcaggagttcaagaccagcctggccaacatggtgaaaccccatctctactaaaaatacaaaaattagccaggcatggtggtgcgtgcctgtaatcccagctacttgggaagctgaggcaggagaatcgcttgaacccaggaggcggaggttgcagtgagccgagaccacgccactgcactccagcctggcaacagagtgagactccgtttcaaaaaaaaaaaaaaacaaaaaaaacaaaaaaagagtctcagtgttggaggatctgggacttaaaagggctctgggctggacatggtagttcacgtctgtaattccagcactttgggaagctgaggtgagaggattgctcgagcccaggacatggagaccagcctgcaaaacatagggataccctcttctttacaaaaaatttcaaaaattagctgggcatggtgacacatgcctgtagtcccagctacttgggaggctgaggtggaagaatggcttaagaccacgagtttgaggctgcagtgagccatgatcgcactactgcactccagcctgggtgacacagcaagacccaatctcaacaaataaataaataaaaagaaaaaaattattttaaaaaaggagctctgagccagacgtggtggctcacgcctgtaatcccagcactttgggaggctgaggtgggcagatcacctaaggtcgggagttcaagaccagcctgatcaacatggagaaaccccatctctactaaaaatacaaaattagccggggtggtgtggcacatgcctgtaatcccagctacttgggaggctgaggcaggagaatcgcttgaacccaggaggtggaggttgtggtgagccaagatcgtgccattgcactccagcctgggcaacaagagtgaaactctgtctcaaaaaaaataaataaataaaagggagctctgatcttaggagatgtcagagtagagccctcggggtgagagcccactttagagatctggaaagccaagaaagaagagtcaaggatcctgggtgccaggtttgggaatcactgaaccaggagccccagacttaaagggcaaaaagcagagaatccctcccaggtttgggggtggcaaatggggtcaccataccggatcagtgtggccccagcaggctccacattcagcagaggcagcagcagcagcaagggtagcagcagcagtggtggagacattgctggggagccgggtgtgaacccaggcttcctagttttctttcccctgtgactccaccctgtttatgccccacctcccggtttaggaggtgaccagaacacgaggtctctcagcaggtgacacagggggacaaggatgtttttgaagatttgtgcagagtatttgtgtagtgtcaacaaaagttgtatcctgtgtccttagtgctcctcattccctacttggggggtggtggtcgtggggtgtcctctgctgggactgcctcccaccccccatcctttagcctctgtcacttttacttctcactttcacatcacttttctgagactcattaaccacagtgtttccttggccaagtgggagggaccagcaggtgtctgtgaagggcctggggaagggagagaggaactgattataagcctgccctcccatatgaagtgggactgcctgcgtctgaggacccagactcttatttgtaggtgaagtatgtttcttgtaagcaacaaaacattgggtcttctttttcatccattcatccgttctatatctttttattcgagagtttagtccatttacattcaatgttgttcttgataaggacgtcctcctgacattttgttacttgttttctggttgttttgtagtattctcttctttctgtccttctttcatgttatttatttatttatttattcatttatttttgagacagaatctcattgtcgcccaggctggagtgccgtggtgcaatctcggctcactgcaacctctgcctcctggattcaagcgattctcgcctcagcctcccgagtagctgggactacaggcgcgtgccactgcacctggctaatttatgtatttttaatagagatttggtttcatgatgttggccatactgatctcaaactcctgacttcaggtgatccacccgcctcagcctcccagagtgctgggattacacatgtgagccaccacacctggcctctgttttccttttagagaagataattttccttggtcatatgatttaattttttgcttttttttttgtatctgttgtatgttttttgatttgaggttaccatgaggcttgcaaatattgtctttttttttttttttttttgagatggaatctcgctctgttacccaagctggagtgcagtggctcgatctcggctcactgcaagctctgcctcctgggttgacgccattctcctgcctcagcctccagggtagctgggactacaggtgcctgccaccacacctggctatttttttttttttttttttgtatatttagtagagacgaggtttcaccgtgttagccaggatggcctcgatctcctgacctcatgatccgcctgccttggcctcccaaagtgctggggttacaggcgtaagccactgtgccctgccataaatactatcttataacccattattttaagctgacaacataaacttaacactgtttgcataaacaaaccaacaaaccaacaaacaataagaaaattagtaaaaactctacaccttcactttgtccccaactttttaactttttgttgtttgtatttatatcttattgtactgtctatgtcttgaagcgttgttgtagttattatttttgattggttcatcctttagtttttctacttaagagttgttcacacaccatagttatactgttacaatacaccatgtttttctgtgtgcttactattagcagtgagttttgtaccttcagatgatttttttttttttttttgagacggagtcttgctctgtcacccaggctggagtgcagtggtgcgatctcagctcactgcaagctccacctcccgggttcatgccattttcctgcctcagcctcccgagtagctgggactacaggcacccaccaccacatccggctaatttttttgtatttttagtagagacggggtttcaccgtgttagccaggatggtctcgatctcctgacctcgtgatccacatgtctctgccttccaaagtgctgggattacacacgtgagccaccgcgtctggcccagatgattttttatcactcattaacatgcttttctttctgactgaagtactccctttagcatttcttgtaggacagatccggtgttgatgaaattcctcagctttgtttgttctgggagagtctttatttctccttcatgcttgaagaatattttcactggatatgctattctagtgtagcaggacaagctgtggagaaaaccccacagacaccgagatagtgaaggaagtagcttttaatcagctggaagcatcagcagactagcatcttaaaattcaagcttgttgagtgcacaatttctgtcgcttttaagggttcacaacactaaagattttacatgaaaggaccgtgattgattgagcaatctagggggtatgtgacaggggctgcatgcaccagtaatcagagcaaagcagaacagaacgagaagtttcacaatgtctttccatacaatgtctggaatttatggataatcggttgctaggtcatgggttgaattttaactatcaggctaaggtcaggcaggcccaggcctggttttgggtctggttttgggtctggtgcatggcgccgggctgcctgcctttggtttcgcttccttgtttcttcttaaaacaggtactgagtatgaaacaatatagaacaatatgggggggtctctttctctcttctctcatttccccgctttgagactctcactcatggtattagtggaagttctcactttcatttttactacttatgtcttcctgtgcaatagattgatagtgattcaaataatatactcgtgctgaagcattctggtgaactaaggtagtgatgaagctttttatcatttgaagaagtataggtagcaaacaagggagtagtaagcggattcctattactattataactcctattataagagttttaagccctcctattgctgggaaccaatttccaaacatggcctcaggatcaaatccgtgccacactcgcactgtacatgtgccagttttgttatatctttaactatgtcttcaactacttgcccttgatcatctatgtggagacagcaattagtaaggttaaattttccacaaactcctccttcagctgctagcaagtagtcgagagctagtctattttggtagatagcattcctcatctgagtctcttgccgggcaagaacagtcaaggcttgaccagtttaattagtaataatttctaaaacagcttgcaactgtatgattcagttgagcatgtagatgggggtccaatatccctatgagccatcttatgcccaagtggcgggcccatagtattgtataattctttcagggggccatcatcatctttccagttacctatggctatgcttcgtttttcacgggaagcatagacagggaatcctaagagtttgttgtttttatgggcagcaggaagaaagatggtttaatagtgccaattacacagctacctgtctactgatcagatagcttagcataagctctatgtccacatatccagtataacccagtaggggcagtccagtcccagtggaattctgggtgggcctaaacagtctgcaattttggaaatttacggaatggatttttttccgtgtaattggaactccaccatgtaactgtttttgtggtaccattatacagtttttgtccaagacaactaacctgtcctacaggatgagtgaattcttttccttctctagctatgcaacattgtccaataattgaggcttttagaacccagaaattgtcagggtggttcttttgggccgagaattcatcaggaactgggtctgtaggaactcattctcgggcttcccatggccactgatctcctgttacagttgctccacaaacaaaacacgaagtgacttttagagactgggctacatgctcggctaactgcaaaaacaaatgtctagtttttcctggaatttcaggcactggcacattttgttcatcatagaaagtgtgaaatactggctctggagagcatgttcgaacctctccttttattaaaatgtttaccctagggtctagtctttttccatcaatgcctagagataagtattttccttttttctattttgggtctgaggggcttgtgattactaattttaaagggttgcagcttccactcatgcaggacaggcttcctttccctttttggagcaaaacaggatctttttcattttttttttcccaagtagcctaaatgacacaagaccagtacccacattcttttccacacaatcctgattcatgacagatgtacttattttcggtcatgtagttttttcctaattaaaagagccacatcctgctcctaacttattgctattaatgacagcacagcgtcaaatcttaagattatgcatttgggcacccctttttcttctgttctggctaatactttacttgtatcatttatgagtccctgccagtgttcagtccttaatcttatttcaaaaactgtggaaatgggaggttcagaggggtcatagcacacatcgggctggtcacttcctggatcacagactttgtactgagtgttattatacaaacatgttccttttggaattcctaggccttcataataactatagaacaaaaagattgtcttaacttgttgtcctacctcagtgacctgaggtatgcactgaaagcagtcctctgtgtgggaagaagcagtggaagcttttaccacacaagtccgtgttataaggaaagtaagtcccacgacgattttcctcatgcttcggccgcgaataggccagtcagcttccgggtgtgactggagcagggcttgtcgtcctcctcagggttactttgcagggattgtctaggcctggtttggcctcccaggttccagtggctgcaggctttccgcagctgtggtgaatcccggccggaattccttctaccttcacagccgtgggagtggtcaggataacggtctggggtcccttccactatggccctaagggagctacgttccagtccttgatccacacgcggtcacctggagaaaaagggtgaactggggagaataagctgaccgggcacctcatttacccaagttgagattgtctcggtaattttccccaaggcctgtagctgtcgctgcaattcaatttcacccaactcttggggagtacccagaagccctcgcggcataggaggaggcctatgatataatatttcataaggggagtgtcctgttttcttagagggggtgcacctgttttaaacaataccataggaagggcctgtatccattttaatcttgtctcttgacatactttccttaaactatttttgatagtccgactcattcgctccaccttcccagaactctgaggtcggcaggcagcatgtagacttgtttgtacctgtccttcttgggaaggctttccaggtattcaaaaggacttgaggattgtgatctaagccatatctgtatcagggggcctcccaagcctattaatgctgtggtttttgtttgttttgtttttttgagacagagtctcactctgtcacccaggctggagtgcagtgtcatgatctcagctcacggcaacctctgcctctcaggttcaagcgattctcatgcctcagcctcccaagcagctgggattacagctgtgtgccaccacgcctggctaatctttgtgattttagcagagactaggtttcatcatgttggccaggctggtctcaaactctgggcctcaagtgatccattcacctcagcctcccagagtgttgggattacaggcgtgagccaccacacccggtctgctacggttcttgcagactcatagaggtactgccttagtggtcttggataacatccagaagaattatctggattaccaggcagaggctcttgttctcttcttttactttctcccaaacaaagggagctgagccacctggaggtggggatagggtgacacaagcaccactgtggccagtagcactgggactgcactgggtctcgaccaaagcccactataaccgctacctggctgctggctatatttgcttaaggccctagggctctaaaaccagcaggttccaaatgcagccaggcttatatccttttcgtcagggcagcaagtttcccaaagctctgggtgggtccagaaatgcagtcagtaagccagggactggagtcaaaaaccttagaaatctacctggtgtcttgttctactgtggctgaactggctctcaaatcacaagacgctcagccgggtgtggtggcgcatccctgtaatcccagcactttgggagactgaggcgagtggatcacctgaggtcaagggtttgagaccagcctgtccaacatggtgaaactccgtctctactaaaaatacaatattagctgggcatggtggtgcatgcctgtaatcccagctactcaggagaactgcttgaacttgggaggcagaagttgtggtgagccaagatcgcaccattgcactacagcctgggcaagaagagcgaaactctgtctcaaaaaaaaaaaaaaaaaatcacaagacactgtctttcccactcttccctccctttgccacaggcagaggtgcctcaccccatggttaccacaaccataggctcaaggggagtactgccaggcttctgccaaagttcactcaaggcccgaggagtcttcagtcagcttctagtgaatgctgccaggcctaggactcacccctcagggcagtgggctcccctctggcccagggaatttccagaaatgccatcctagagccaagatctggcatcagggattccaagatcccacttctcctccactgtgtctgagctggtacctgagctgaaagacaaagttccttttacttttccctctgcgtttctcaagcagaaagagtccctcactgtagccaccatagctgggaatgtggtgggtctcacctgaagacagcatgtctcagagtctcaccgaaggccaatagcatgtagtacctggcatcactgcttgttattcagggcccaacggctcttgagtcagcaggtgatagagcctgccaggactggatccttcccttcagggtagctggttcccttctcgcccaaggtgtgtctagaaatgtcatctggaagctaagtcctggaatgggaggctcatgactctgactcgtgtcccatcctactgtgtctgagctggtatccaagatgcaagacaaagtcccctttactttcctctcctctccttaaacagaagaaaaggggtcctttttggagccacaaggtatgctacctggatttgggaaaggagtggcacaagtggccccttagctgctgaggttggtgtcttagtaggtcatgtgccccccaaatccaatggctttgagtccagctcagcaccaggacttgcctaggagttgcagtcctcatgacctagactgcctttcaactttatttaggaccccagagcactttagccaacagtggtgtggcttgccaaacctcacattccgactgttgggatgggcgattctcctctggcttgggctggtctaaaatgctcactccaggagcagacagtctgctgagttcagggcagttttgctttccactgtgacagggcagcactgagttcaatgcaaagtctcaaaatcactgcactctctctctcccaaacacacagcttctctctgtgccatgcagctactgccagggatggaggatggcgggaattggcaactaaagactgtcctcctaccctcttcagtgtgtccttcagcaatatgaagttaaaaccaggtattgtaaatgcttacctgatttttagttcgtatgaaggtgcttttttcctgtagattgttgttaaatgcggtattcctgaagatgaaatgattggtggaaacttatatttggccatcttgctccagcccctctctagacattctcttactgttttatttggaaaatactgaaacagacatacacacacacaaataaaaatcacccatagccccatcatctctaaaatgtataaaaataatttgcactgtctctctgttcgccagtccctcttctcccagattaagcttctcaatttttaacaagcataagaaatctagttaaaatgcagattcctgggcaccaccctcagctattctagtttgggaggcctaggatgagacccaagaatctgcatttttaaacaaattcactgatcggctgggcgcagtggctcacacctgtaatcccagcactttgggaggccaaggcaggcggatcatgagatcaggagttcaagaccagcctggccaacttagtgaaaccccatctctactaaaaatacaaaaaattacccaggtgtggtagcgggcacctgtaatcccagctactcaggaggatgaggcaggagaattgcgtgaacccgggaggaggaagttgcagtgagccgagatctcgcgactgcactccagtccgggcgacagtgtgagactctgtctcaaaataaataaataaataaataaataaataaataaataaataaatacaataaaatacaataaaaaattttcactgatcatggagccacaaagatgtctgagaaaccctattcaagctctttggctttctaggatagatttgcatgtcaatatcagcatgcacatttttttttgttttttgtttttggtatttgcttgtttgttttagtaaataaaagctgctgtaattattgatctgcaagtgattgtttttaacttaaccatattccctggacttcagaaaaaaattgacataacttatctacagtaaaacacatgagtctgaggccaggcgtggtggctcaggcctgtaatcccagcactttcggaggctgaggcgggcagatcgcttgaggtcaggagttcaagaccagcctgtccaacatggtgaaaccccatctctacaaaaatacaaaaattagctgggcgtgatggtgtgcgcctgtaatcccagctgcttgggaggctgacgcaggagaaatgcttgcagaggcagaggttgcagtgagcagagatcatgccactgcactccagcctgagcaacagagcgagactccgtctcaaaaaaaacaaaacaaacgccaggcgtggtggctcatgcctgtaatcccagcactttgagaggctgaggcgggcagatcacctgaggtcgagagttcgagaccagcctgaccaacatggagaaaccccatctatactaaaaatacaaaattagccgggcatggtgacacatgcctgtagtcccagctactcgggaggctgaggcaggagaatcacttgaacctaggaggcagaggttgaagtgagccgagatcgcaccattgcactccggcctgggcaacaagagtgaaactccgtctcaaaaaaaaaaaaaagtaaaacttagccaggcatggtgccatgtacctgtggtcccagctgctctgtaggctgaggtgggaggattgcttgagcccagcagcttgcagatgcagttagcagtgattgtgctactgcactccagcctgggtgatggagcagaaaataaactaataatctggttcccaaatgtcaatagtgtcaaggttgagaaaccttgctgtattcattcctcagcccatctcattttcttgatttcaaaataagttgcagacaacagtattcttcagtgcatatacttcacatacccattcttttaaacaggttttaaacagctacttagtgtttcagaatacaaatgtaacgctacttccagaactgattctctacatagattgctccccgtccttttttttttttttttttttttgagatggagttttgctcttgttgcccaggctggagtgcaatggcatgatcttggctcactgcaacctctgcctcccaggttcaagcaattctcctgcctcagtctcccgagtagctgggattacgggtgtctgccacaacacccagctaatttttgtatttttagtagagatggggtttcatcatgttgtccaggctggcctcgaactcctgacctcgtgacctgcccacctcggcctcccaaggccgtatatatatatgggagtttattaagtattaactcacacaatcacaagggtcccacaataggccgtctgcacattgcggagcaaggagagccagtccgagttccagaactgaagaacttggagtccgatgttcgagggcaggaagcatccagcacgggagaaagacggaggctgggaggctaggccagtctctcttttcacatttttctgcctgcttatattctagccacaatggcagctgattagattgtgcccgtccagattaagggtgggtctgccttttccagcccactgactcaaatgtttttttgtttgtttgtttgttttattttattttattttactttaagttctgggatacatgtgcagaacatgcaggtttattacatgggtaaacgtgtgccatggtggtttgctgcacctatcaacccgtcatctaggttttaacccccacatgcattaggtatttgtcctaatgctcccctccccctttgtcccccagccctcaacaggccccagtgtgcgatgttcccctcctcaaatgttaatctcttttggcaacaccctcatgacacccaggatcaatactttgtatccttcaatccaatcaagttgacagtatgaaccatcacagtccttatagatattttctgtgcatctgttccatatcatctgtattagtccattttgcattgcaataaaggaatacctgaggctgggtaatttataaagaaaaggccaggtgggtgcctcatgcctgtaaccccagcatttcaggaggctgaggcaggaggactgcttgagcccaggagttggagaccagcctgggcaacaaagggagactctgtctctaggaaaaaaaaacaattaaattatctgggcgtagtggtgcatgcctgtggtcccagttacctgggaggctgaggcaggaggatcgcttgagcctgggaggtggaggctgtagtgagccatgattgtgccactgcactccagcctgggcaacaaagtcaatcactcaatcacacattcactgtcctacaattatggaaatcagaagcccgaaatgatttcagtgctgaaactgccatgtttgcagtgctgtgtcccctctggaggctctagagcagaatccacgtccttgccttccccagcttctagaggagctctgcaggagccccttctcccttcttcaaagccagcatcctggcatcttgcttccgtcttcacatgaacttctgaatcaatctccctctgcctccctcttataaggacccttgtgatgacatttagggtccacctggatgacccaggataatctctgttctcaaactccttcatttgattacatctgctaaatccctttcctcatataaggtagtattcacaaccccagggattgaggtgtgaatatattttgggggccactcttcagcccacagtgttggtaatttgcttcctatcttaatgcctatttccccattcgagtttaattcctatgagggcaaagatcttcatctgtttaattctccactgtgtccccagcacctaggacagagcctggcacatagtgaataataaataatgaccaaggcaacatggcaaaaccccgtctccaccgggcgtggtggctcacacctgtaatcccagcactttgggaggccaaggcgggcggaccacctgaggtctggagttcaagactggcctgaccaacatagagaaaccccgtccctactaaaaatacaaaaattagccgggcgtggtggcacatgcctgtaatcccagctactcgggaggttgaggcaggagaatcgctggaacccaggaggcagaggttgcagtgagccaagatggtgccactgcactccagcctgggcaacaagagcaaaactccctctcaaaaaaaaaaaatctccacaaaatatttaaaaattagtcaagcatggtggcccacgcctgtggtcccggctacacgtgaggctgaggcaggaggatcgctttctccggggagttcgaggctacagtgagccattaccgcgccactgcactccagcttgggcgacagagtgagtccctgtctcaataataataacaataataaaataataataataataatagtaaagatccactttgtgcactccttgctctggggaatttttctgaaacagtggacagtgtctctatgataactctcaccaccaccaccaccacccccgctttgttttctcagtcagagcactcgatctgggccctttcaactcgcccctcatgctttccgtctgcagcaccccatccaacttcacccaaagcgcccttaagtagtttctgagaggccgtgcctgcaaattcccaattggccacaaggtggaggtgtgggcctgttttcccagccgccacccgtttctagagctggacccctggaacaccaggctctttctagcttccctgcttccgccctagcggttcccaccggcctggaatgccgacttgctcgctctctgcatcccacgggaaaaggagcagaacagaggcttcctccctgactctcctgcccgagcttactgggacctgaatctccccgtgtttagtagtttagcggtttgtgatcaggtcggcctccaccatcagagcagcacactctcgagatggggctcaggcctgactcttttcggggtccccagaatcgctcaacacaattcttccagaagcctcgggatgcgattaaaggattgccagatttttcgaccggtcgttttgtcgaatcatttagttctgggtagcaagaggctgaggaggggagagtgacgtcacctccgcgggtggggcagcaccgctccccgaacccgggggcctcgagctccccaggggtctaggaatccggagggagagaggagaaacaggagatgagatccgggggaatggtatccttgcccccttgaacaggaactggtaaacccttaccaattacggccaacccccactgccacctgtcgctgccgtcgcaacctgtcgcctcccacccatgttgtggctgcgcccgcccccgtcagggcgtgaccacggcgtggattacaacgaccgtgatgctccacggcgccgggagcttttgacggaaggtagcgtaggcgaggggcttcatgggactcgtattacaaaacccctcaccagggtgcgtcctggagaaaaggggtgatacccttcgcctccctcttcctcaactccatgggtacaggcacaaagttttctattattatttttgagatggagtttcgttgttgcccaggctggagtgcaatggtgcggtcttggctcactgcaacctcggcctcccaagttcaagccattcgcctgcctcagcctcccgagtagctgggattacaggcatgcgccaccactcccggataattttttttgtatttttagtagagacggggtttcaccatgttggccaggttggtctcgaactcctgacctcaggtgatccacccgcctcgacctcccaaagttctgggattacgggcgtgagacaccgcgcccggtcacaaagctttctcgttaaaaagtacgctctgaaaagaagcaacccaggcaggttcgctcaatggaaatagtggatttttactgggtagcaggacctccgcgaccacccgctgcgcatgcgcttcacttgggcgtcacccggggaactgcgcctgcgcagtctctccccatccgaggtccgctccgcgagtgcgagcgcgcgccaggcccacccgggcgctgctcttcatgtccccgcggtcgaagacggccacatacgtccccaagaagacgtcaccgaggatccagaagggccctgcaggcggagggacatccagggcctggaaaccggacaagcagaggcggacgccatttcgagtagtctgcaaggcaacaagacgacaactgggtgtcgcggccacaaggacggccatttgcctgggagcccgtccatcccccccaccctcgggttctttgatgttcgccaacaaactgccatcacagggaaaagaaatgtttctgtggccccttcccttcctagtgacgtctctcagctctaccctctcaaaccgtcatatgacgtcactatggcgtcatggtgatggccacctacctggatgacgtaatcatgggccgtgaggttaaaccagacccccccaagaaggaaggagactgcggggagctttgggatttccgagcacaggatgatgtactgggggagaagaggaactagtgaagatgagagattcctgctctgttcagtcccttccgtggctccccagtgccatagggtaatttccctattgagcacctgggtactcagcgtcctgtgtgcagaggccctgccgcctagacttacgcagtcccaagcaaacctgcatgatcgtctccctccacccggccaccatccgcagagtcgcagtgtagacacgtggaaagtgtcctcaattcctccaccaccctccagactatctgtcacgaagtccagtgcctgctgccctggaaagccccttaaatacttgcctcccaccctcaggccctttgatgttcactgtcaaactgccatcagccttcccagcccgtacccaccagactgggacctcacctccccagccagcaaggggattcccccaatggctgcatgcagggcccggatctcctcagtgggtcctgtgatgagggacgtgcccgtatccaggatggcagcacagcccttggcacagagagtcagccctgggcccaccttcacactgagggggaaggaggcagtcatcagaggcagggtcctaggagtccaggcccccagcctccagctccagagccaggagaccaagtccctcaccgctccatgtggatctgccagtaggcagggaccgtgactggcacgaaggtgaggggtgggatgtagtgtgccgggtccgagccccccaggaccagctctcctccatcaggctcttcagggtccctgcaggggcagagtgtagagagtgtagatgtcagtgtcactggccctccctcagccctaggtattgccaggaatggcacttcccaccaactgggttgtttctggagttcctacggggtaatgggatgcaggaagggcctagatgttgggactggaagccgggcaagaaaagcatgatgcttttcttggtggaagctagaacttcctgaagtgaagacgagacttcatttggctgtggaaggtagagttttggggaatttcctgagctgaatatcatagtaaccaagtagagcagtggtgtcttggaattggctcttgaaggtgtgacttgtgcaggggtggggtggcttcctgagtaggagaagagaatttctgaattgcctgttgtgatatctagagaggtgttagacttcctgagttggctgagagcgatgggaacagggatggagacttcctggaaggtggaggagagcaggatctgctaggtggttggtagaactgctagagtgggttggatgtcagggtaactgagtgggcataggattttctgactgtgtgtgacaggcctctgggagggaaagtggagacttcttggaaacttcttggatgttgggtgggacttctgagcataatactgaacttcctagcaggtgagtgggacttcctggattaaatcgggcaattcctgacttctggtcagtgttctcaaatgggatttgagcattctttgtgaggaagagaaagctcctgagtattttgttgggtggggcatggaatttcctagtttgattttgaaacatggagcattctgaactgatggtgggtttccttagtatgtcttaagttgtcatttaagctctgggacttcgaatagggttgaggtgtttctttatagggcaggtgacttcctgcatggaggatgcaacttcttgtattgaatggctgacttcctgaatggacagtgtaagtgggtgactctgagaatgagaattcctgcattgggtcagtgacttcctgaaggaagactctcttccttcttggggataggactcatagataggtgcacacttcccagtacctgttgaggtaaaaggagaagacaggcttatccaatagcccctgctccaccagtacatccatcgggggccgaactccttccacagacagaatgggaaaaccgaggcccaatatcccatcaaaatgggcaaaagcgaagaccaggctgggctcccagagagcctccccgaaaatcactgatgcacccttgattccaccaatctaggggtagattgagatgtgaccagttacttttgggaggacaataaccacatgtcctgaggtctcccaaaccaaggcatgaatcctaggtctggggacttctggatgcaagccccaacttcctaggaaactatgcctcttgagaagccccaccccttcacccaggaacccctttcttctccttgagaagccccacctcttcacccaggaagctcctcccctgcttgagaagccccacctcttcacccaggaagctcctcctccctgcttgagaagccccacctcttaaccttggaagctcctcccccctgcttgagaagccccacctcttcacccaggaagcccctccccctccttgtgacgcaccatcccttcactctgaaaggcaggccctcctccccacttgaaaagccccatccattggcttgggaagctcctcctcgagcctcttcctaagccagatgatcttagacaatggggttctcccaggctcaagacttctgagagtcaaaggccactcacagtcagcttgtcctcgctcaggattccatctacccgcccagttccatattgaatggcaaacttggtcccattggcctggaaggagctagaggctttgggatcaaatcggtggtgtaaccctaggttagaggtcagaaaggtgtcatgggggagggaatctccccagtgcctactgcccctttgactttctgacctgtgagggcatgataaaagaacagttcctcaaaagcctctgagaagctgaggtccagccccgcctcctcccttcacccccattcagccttattctcccacatagaagctcacagcagggcacactgaagaagtggcatctcctggacgggacccagagattggaggagccagtgtcaaaggcaacagtgaagttttgtggaggcgttcccagcccaatttccccaaaatactgcacctgatagcaaaagaggagagtaaacgaagagtttggctcaagggcgcaggggtgagggctgtgtggggctgtgactcacatccctgtagttcgagagaggtacgaagatgggcttgtccccaggggatggggcccccaacttggggagctctgctggttctctccatcccctcagtaggttcaggatcctgcgtccaggttggactcgatgaagagggatgctgtagggaaagaggatattgacaggaagctgcccttcttggagaacctctaaatagacttacccaaataggatatgatgacaaattcaacatctccaaggcactacaatagtagtcagtaccagaaaccctgcaataacaacctccagaaaagcccatcaaagatgccatgatgacaaatatccccaaagactttacaagagcaaaccatcccaaacagacctttccatgtccaaatcccttaaaataagctattcccaaggaattgacattcttaaagatttcccaagaccctaacagaaaacctaacctttgcaaaagcccttgggtggtggcccctgcatgcttcagttcgtgaggttagggactattttccccacccttgaggagaaaaatgtaagcgtcaaatcttaattgtcttgctgtgttgcccgtgctgatctcaaactcctggcctcagcctcctaaagtgctgggattacagaggagagccactatgccctgtccgggttcctttaaactgtatttgcaaaagcaggaggcaaacaggatttggcccttaagctgagtgtttgcaacccttgacttagagggccaattacaattcaggtatcttagttgctaattaagtaggtctaggatggagccgagaatttggatttctaacaagttcccaggtcatgacgatgctgttgatacaacatttggagactcattttctttgcattgacttagaaaatggccatgagacattaggttcaaaaagcaggttaacaagcaccatgtgcggtaatatcttcgttcctgcctttagtcactccttgaagcacttgtcacatcactcacacctttcccgtcaccccccatgagtcagtctttgagaggcacgagaatgtgaagtggggaaaactcttcctggaagtgtacacccctccccctaccaagagttccagggaatgaagacaagagaggagaaaaagagagatgggggcggggaggggacatcagaggtaaggtagtgggaagacttcttgcatagggtccccaagattggatttctttttcttcttttaaactttttatttgaaacagggtctccctctgtcacccaggctggagtgcagtagtgcagtcagggctcactgcagccttgatctccagggctcaagtgattctcccacctcagcctctggagtagctgagactatgggcacaccaccacacctggctttttattttattttattttatttattaattttttttttagacaaggtgtcaccctgttgcccagcctggagtgcagtagcaggatcatagcccactgccccctcgaactactgggctcaagcaatcctccttcctcaccctcctgaactagctgggaccatgggtgtgcaccaccacactgagctaatttttgtattttttgtagaggtggagtctggccatgttgcccaggctggtctcaaaactcttggcctcaaacaagcttcccaccttggacttccaaagtgctgggttacaggtgtgagccatgtctctggccaaaaacatgacttcttcaggccagtttgatgggcgtgatgtgggggagtctcagtttaaatgtcacatatctggggctcgaagatgggaggagtgtgtcacaggtctggaaaccacagtacctaatcatcagagctcatagtagggtctgcagagacctctcaaaaacatgtcctggccaggcgcagtggctcacgcctgtaatcccagcactttgggaggctgaggcaggcagatcacgaagtcaggagttcaagaccagcttggccaacatggtgaaacctcatctctactaaagatacaaaaaaaattagccgggcatggtgactcacgcctgtaatcccagcactttcagaggcaggagaatggtgtcagcctgggaggtggaggttgcagtgagctgagatcgcgccattgcactccagcctgggcgacagggcaagactccgtctcaaaaaaaaaaaaaaaaaaaggccaggcgcggtggcttacgcctgtaatcccagcactttgcgaggctgaggtgggtggatcacgaggtcaggagatcgagaccatcctggctaacactgtgaaaccccatctctactaaaaatacaaaaaattagccgggcgtggtggcgggtgcctgtagtcccagctgcttgggaggctgaggcaggagaatgatgtgaacccgggggacagagcttgcagtgagccaagattgcgccactgcactccagcctgggcaacagagtgagactcagtctcaaaaaaaaaaaaaaaaaaaaagtcctgagaggagggggaggggtcctcaatctagagtctcagtgttgtaagatctgggacttaaaagggctctgggaccggacgcgggggctcacagctgtaaccacagcacttttggaggctgaggcggaaagatcacttgaggtcaggagttcaagacagcctggcaaacatggcgaaaccccatctctactaaaaatacaaaaattagccgggcgtggtggcatgtgcctgtagtcccagctacttgggaggctgaggcaggagaatcacttgaacccgggaggcagaggttgcagtgagctgagatcgccccactgcactccagcctgggtaacagagcaagactctgtctcaaataataataataataataaataataataataataataataataataaaagggctctggtcagccaggcgcggtggctcacgcctgtaatcccagcactttgggaggccgaggtgagcggatcacgaggtcaggggttccagaccagcctggccaacatggtgaaaccccgtctctactaaaaatacaaaaattagctgagcatggtggcgcgagcctgtaatcccagctacttgggaagctgaggcaggagaatcgcttgaacccaggaggcagaggtttcagtgagctgagatcatgccattgcactccagcctgggcaacagagtgagactccatctcaaaaaaaagaaatctggtcttaagagatgtcagagtggagcccttaggggtgacagcctggtttagagatctggaaagctgagaaagaagctctagggatcctgggtgccaagtttggggatcactgaactgggagtcctagacttaaagggcaagaggcagaaaatccctcctaaggttggggtggtagatggggtcaccataccggatcagtgtggccccggaaggctccacattcagcagaggcagcagcagcagcaggggttgcagcagcggtggtggagacatcgctggggacctgggtgtgaacccaggtgtcctggggcctcattttctttcccctgtgactccaccctgttcatgccccacctccaggtttagaaggagaccaggacatgaaatctgtccgcaggtgacgcagtgggacaaggatgttttttgaagatttgtgcagagtatttttgtagggttggcagaagtagcatcctgtgctcctggtgctcctcactccctacttgggtggcagtggtggtggggtctcctccaccgtcaccacctcccacccccccatccttcagctgctgtcagttttacttttaactttcacataacttttctgagacttattaaccacaagtgtttccttggccaagtgggagagaccagcaggtatctgtgaagggcctgggggaagggagaaaggacatgattagacacctgccctcacatatgaagtgggcccgcatttcaggacccagtctcttactgttttatttgtaggtgaagtatgtttcttgttgacaacagatcattgggtattgttttttgtttgtttgtttttgtttttgttttttggtttttttttttttgagaccgagtttcactcttgttgcccaggctgggattacaggcatgcgcaaccacgccccactaattttgtagttttagtagagacagggtttctccatgttggtcaggctggtctagaactcccgacctcaggtgatccgcccgcctcagcctcctaaagtgctgggattacaggcgtgagccactgcacccagctgattctcaattatttcaatctctttgttaaatttatgtgatggaatctgaattccttctgtgtgttagcttgaatttctttgagtttcctcaaaacagctattttaaattctctgtcggaaaggtcacatatctctgtttcttcaaggattggtccttggtggcttatttgatttgtttggtaaggtcatttattctggatggccttgatgcttatagatgttcattggtggctgggcattgatgagttatttatttatttatttatttatttatttatttatttatttagatggagttttgctcttgttgcccaagctgcagtgcaatggtgtgatctcagctcactgcaacctctgcctcccaggtgcaagtaattctgcctcagcctcccgagtagctgggactacaggcacccgataccaccctggctaaattttttttttttttttgagatggagtttcactcttattgcctaggctggagtgtaatggcgccatcttggctcactgcaacctctgcctcctgagttcaagcgattgtcctgtctcagcctcccaagtagctgggattataggcgcatgccagctagtttttgtatttttagtaaagacagggtttcatcatattggtcaggctggtctcgaactcctgacctcaggtgatccacctgcctcggcctcccaaagtgctgggattacaggcatgagccaccgcacccagcctacacccagctaatttttgtatttttagaagagacagggtttcaccatgttgtctagcctggtctcaaactcctgacctcaggtgatcttcctgcttcagcctcccaaaatgctgggattagacatgagccaccatgcctggccatgttaggtatttattgtagtctttgcagacaaggcttgtttgtacctgtcctttttggggaggctttccaggtattcaaaagtacttgggtgttgtgatctaagccatgtctgcattagggggctccccaagcccattaatgctgtggttcttgcaaactcatagaggtactatcttagtggtcttagataagatccagaagatttatctggattaccaggcagagactcttgctctcttcccttgctttctctcaaacagagtcagtctctctctctccctctctctctctctctctctctctctctctctgtctctgtctctctctctctgctgagctacctggagctgggagtggggtgacacaaacaccccatgcctactatcactgggattgcgctgggtcctgcccatggcctcctgtaaccacgacctacctgcctactgcttatgtttgctcaaggcccttgggctctaaaactagcaggttccaaaggcagccatgcttgcatccttcccttcagggcatcaagttacctcaggtcccaggtgggtccagagatacagtcagtgagccagggactggagtcaaaacccttagaaatcggctggatgcggtaactcatgcctgtaatcccagcactttaggaggctgaggcaggcggatcacttgaggtcaggagttcgaggccagtctggccaacatggtgaaaccctgtctctactaaaaatacaaaaattagccaggcgtggtggtcagcgcctgtaatcccagctactcggaaggccgaggcaggagaatcacttgaacctgggaggcggaagttgcagtgagccaagatcgcgctgctacactccagtctgggcgacagagcaagactccctctcaaaaaaaaaaaaaaaaaaaaaagaaacaaaagaaaggctaggtgcggtgggggtgcgtttgggaggctgggggtgtcatcccagccctttggaaggctgaggcaggaggatcgcttgcgcctgggagttggagaccagcctgggcaacaaagggagaccctgtctgtacaaaaaaaatgtaaaaattatctgggcgtaatggcacactcctgtagtcccagctactggggaaggtgaggctggaggataacttgagcctaggaggctgaagctgcagtgagccgtcatcacgccactgcactccatcccaggtgacagagtgagacactgtctcaacagaaataaataaatacataaataatggtaaagatccactttgtgcactccttgctctgggggattttcctgaagcagccgaacgtgtccctgataactgtcaccacccccctttgttttctcagtcagagcactcgatctgggccccttcaactcgccccgcacgctttccgtctgcagcaccccatccaactgcacccaagcgcccttaagtagtttgagaggccgtgcctgcaaattcccaattggccacaaggtggaggtgtgggcctgttttcccagccaagattccccagccgccacccgtttctagagctggacccctggaacaccaggctctctccagctttcctgcttccgccctagcagttcccaccgcctggaatgccgacttgctcgctctctgcaccccacgggaaaaggagcagaacaggcttcctccctgactcccctgcccaagcgtactgggagatctcctgccgaacacggcccggccaatgggacctggatctccccatgtcttgtctctcagggggttgtgaccgagtgggcctccaccatcagaggagcacagtttccagaatcgcccaacacaatctttcccgaatcccctcaggaagtgattaggtaaaggattgccagatttttaaacccgtcattttatttactaaccttgtaagaaaggaattatcgcccacattttaccgggttggggaggggctgctgcggtgcagcaagattaagaggaggcagcccaggtgcacttggaggggaattgaacctggttcttgaagctgcagacaccaagtaatcagcccagatgcctcgcatcgtctttgccaggattacttttgcccctgttccattggtgggaatctgtcacgtggttgctcctggctgcaaggacgacccggaaatgtagtccagttgtgtgtccaagagtgggggaccctttgggtgactctcaggcactgtgggccacatcagaccccacaaggcctcaagttcggacctgcgttccctctatgatcttatatcgcaccttcccgaggtctcgcattagtgttttttttttttttttttttttttttttgaggcagaatctcgctctgttcaggctggagtgcagtggctgtgatctcggctcactgcaacctccgaacccccaggttcaagcgattctcctgccaatttttgtaattttagtagggacggagttttgccatgttggccatgctggtctcgaactcctgacctcaggtgatctgcccgccttggcctcccaaagtgttgggattacaggcatgagccactgcacctggcctactcaaaatattaaacataggccgggcatggtggcttacacgtgtcatcccagcacgttggcaggctgaggtgggaggattgcttgagcccaggagttccagaccagcctggggaacatagtgagtctgtctctacaaaagaattacctgggcttgctagcgcatgcttgtagtcccagctactctggagactgagatggcaggatcacttagcccaggaggtcgtggctgcagtgagctgtgactacgccaccccactccagcctaggtagcagagtgagacactgtctcaaaacaaaacaaaacaaaaagttaaacatagagttactgcatgacccagcaatcccactccaaggtgaaatgaaacatatgtctacacaaaaacttgtacatgaatgttcatagcagcgttgcagccaagaatagaaacatcccacctgtccattaactggcgaatgggtaggtaaaaggtggtatatccataccatggactattactgtgccataaacagaaatgaagtactgatacattctacaaagtagatgaacctagaaaacgttatgcccagtgagagatgccagtcacaaagagctacatattccaacgatccatttataggaaatgtctagaataggaaaattccataaagtcatataattttttctttttttgaaacagagccttgctttgtcacccaggctggagagcagtggtaccattatggctcactgcaacctcaacctcctgggcacaagtgatcctcccatctcagcctcctgagtagctgggacaagaggcattcgctaccctgcatggcttagtttttaattttttgtagagatgggggtgggggtgtctccctatgttgcccagattggtctcaaactcctgggctcaaacaatcctccagcattggcctcccgaagtgctggggttacaggcatgagccacctcactcagccagatatagattaatggctgcctcaagctggaagaaaagggtgggagaattgggtataactgttttttgtttgtttgagatggagtctaggtctgttgccaggctggagggtagtggcgtgatctaggctcactgcaacctctgcctcctgggttcaagcgattctcctgcctcagcctcctgagtagctgggatttcaggtgcctgccaccatactcggctaatttttgtatttttgtagcgacggggtttcgccttgttggctaggatggtctcaatctcttgaccttgtgatctgccctccttggccttccaaagtgctgggattacaggtgtgagccaccgtggccaacgggtatatctgcttatgggaatggggtttctttgtggactgaccaaaatgttctaaaattggttatggtggtggttgcacaacccgtgaacttgctaaaaaccattaaattgtacttgaaagtgctgaattgtttggtgtgtgaaccaaatctcaataaagctattaccaaaaaaattagagaatattgggttacttacaaatgagaaccttggtccacagctaccttcagacaacaaaactgccagtgaccgagtgcttctgtatgccaggcactgcgcttccgggatcctcatacccttcataagaaataagaacaagaggccgggcacggcagcacacgcctgtaattcctgcactttgagaggccgaggtgggtggattgcctgaggtcgggagttcgagaccagcctggccaacatgatgaaaccctgtctctattaaaaatacaaaaaattagccgggcgtggtggcaggtgcctgtagtcccagctagtcaggaggctgaggcaggagaatggcgtgaacccggcaggcagaggttgcagtgagccgagatcacgccactgtactagagtaaactctgtctcaaataaataaataaataaataaataagaacaaagccgggcgtggtggctcatgcctgtaatcccagcactttgggaggctgagatgagtggatcacttgatgtcaggagtttgaaaccagcctgcccaacatggtgaaaccccgtctctactaaaaacacaaaaattagccgggcatggtggtgcgcacccgtgatcccagctactcaggaggctgaggcaggagaataacttgaacccgggaggcagaagttgcagtgaaccaagattgggccactgcactctagcctgggtgacaagagcaaaactcaaagaaaaaaggaagaacgatttatcctatttaccagtaggtcaaccgagactgagtgcaatgtgactcgtcccaaaagtgttgtaattcctcttcagcctatttcaggactcttgcacttttctaacagtggaaacttagaactactttaacagccacaagaatcaatacaggctggatgagaggctcatgcctgtaatcccggcaccttgggaggccaaggtgggcagatcgcctgagtccatgagttcaagaacagcctaggcaacgtggcgaaaccccatctctaacaaaaatgtaaaaacttagctgggtgtggtggctcatgcctgcggtcccacatactctggaggctgaggtgggaggatcacctgagcccaggaggtcagggctgcaataagccaagatggcaccactgcactccagcctgggcgacagagtgagatcttatcttaaaaaaataaataaataaataaataaatataaatacagttccaccatatcaggcacctcatttgaaacccaccctgtttatgcttttacctcatttagtcataagagtaaggcaacaaggtcatactcttgatcccggtgggctaggggaagtccccatatgctggtgtgggacctccaccccagccaatgtccaggctcttgacaccatctcgggaaggaacttgaggacaagtgggaaaatactgaaagtacaaagatgtattgcaaagtgaaaagtacacactcaacaaagaggagtacaggtggactccagagagagtctcctgcagggggggtttggggctgctaccttaatgggtttctctctttttgttttgagacagtcttgctctgtccccaggctggagtgcagtggcacgatcttggctcactgcaacctccgcctcacgggttccagcgattctcctgcctcagtctcctgagtagctgggactacaggtatgtactatggatttctttaatcaaggagtggaatattcatgaagattcctagaaaaaggagatttttgagaactgtggtgccacccacttttacaccaaatatgggtgttcctgtaaccgtcctggtgctggtgggtgtgtgtttatgttaatgagcatataacgaggtcctaggtgagacctaggtcatatgtagggccttgttgggtccaatgtgtcttagccaggttggtccacacctagggttttcaagagtcttatcagcccccacctgctgcaactatttcaacagtttccttttgctagtcatgtgaaactgctgcctggaattttctattctcctgtgactaccctgtgttattcctgtctcgctttttttttttttttttttttttgagatagagtttcagtctgtcggtaggctggagtgcagtggcgcgatctcggctcactgcaacctctgactccttggttcaagagattctcctgcctcagcctcccaagtagttgggattacaggcacgtgccaccacgcccagctaatttttgtatttttagttgagatggggtttcaccatgttggccaggatggtctccatctcctgacatcgtgatctgcctgcctcagccttccaaaatgctgggattactggcatgaaccactgtgcctagcctcctgtctcactctttttaatttttttatttttatttatttgtttatttatttatttattttgagacggagtcttactctgttgccaggctggagtgcagtggcgcgttctcggctcactgcaacctccgcctcctgggttcaagtgattcttctgtctcagcctcccaagtagctgggattacaggcacgtaccaccacgcctggctattttttttgtattttttttagtagagatggggtttcatggtgttggtcaggctggtcttgaactcctgaccttgtgatccacctgccttggcctcccaaagtgctgggattacaggcgtgagccaccgtgccctgcctttatttttttatttttgagatgcagttttgctcctgctgcccagggtggaatgcaatggcaagatcttggctcaccacaacctctgtctcccgggttcaattctcctgcctcagcctcctgagtagctgggattacaggtgcccgccaccatgcccggctaattttatatttttagtagagaccaggtttcagcaagttggtcaggctagtctcgaactcctgatctcaggtgatccacctgccttggcctcccaaagtgctgggattacaggcatgagccaccatgcccggctttctcactcctgtttgcaatttacaggcaaggaaactgaggcacggggaggttaaggaactgggctcagtgttacacaggaaggaagtgacagagacaccaggttctgccatttccaacgctcatgttaatcacttgtttcgcttctaacatccctaggtggaaaattccacaatctcaaacgatgggcctgagtagacataataagttacagaagagcatggatcacatagtcccatttcttttttataaaggcatacacatatgtcagaggcattccaaccacagcgattctgtcttgaataggagcttggtaaaataaggctgagacctactgggctgcgttcccaggaggttaaggcattcttagtcacaggatgagataggataggaggttggcacaagatacgggtcacaaagagcttgctgataaaacagcatatgcagtaaagaagtcagccagatcccagcaaaaccaagatggcgatgagagtgacctctagccgtcctcatggctcattatacactaattataacgcattagcatgctaaaagtcacacccaccagcacgatgacagcttacaaatgccatggcaacgtcaggaagttcccctatatggtctaaacgggggaggaaccctcaattctgagaattgcctacccttttcctggaaaactcatgaataatccacccgttgtttagtatataatcaagaaataactataagtataatcacagtgaacagcccaagccgctgctctacctggagtagccattcttttattcctttatttttattgcattttatttttgagacggagtttcgctcttgttacccagactggagtgcaatggcgcaatctcggctcaccgcaacctcggctcaccgcaacctccgcctcctgggttcaagcgattctcctgcctcagcctctcccgagtagctgggattacaggcgcccgccaccatgcctggctaattttgtatttttagtagagacggagtttctccatgttggtcaggctgatctcaaactcccgacctcaggtgatctgcccacctcggcctcccaaagtgctgggattacaggcgtgagccaccgcgcccggtccgagactgagcttttttaattcttccaatcaccaagttattgaaaccatttttgcaaaattttaacaatgagaaaattctgacatctcaaatctggccaggcacagcggctcacgcctgtaatcccaacactctggaaggccgaggtaggtggattgcctgaggtcaggagttcgataccagcctggcaaacatggtgaaaccccatctctactaaaaatagaaaaattagccggccgtggtggtgggcacctgtaatcccagctacaagggaggctgaggcaggagaatcgcttgaacccaggaggcggaagttgcagttagctgagatcgcggcactgcactccagcctgggcaacagagtgagactccatctcaaaaaaaaaaaagtaaaaataagcccggtgccgcagctcacgcctgtaatcccagcactttgggaggccgaggcaggcggatcatttgaagtcaggagttcgagaccagcctcgccaacatggcgaaaccctgtctctactaaaaatacaaaaaaatgagccgggcgtggtggcacatgcctgtaatcccagttacttgggagggtgaggcaagagaatctcttgaacccaggacgcagaggctggagtgagctgagatcacaccactgcactccagtctggggtgacagagtgagacctctccaaataaataaataaaaataaataaaactaacaagcagcacgactccaaaatcagaaaacttgtaacgaccaaaaaagtgcaaacgtgccttaaatcagtcatgtgcgacaagcagctatagctagggtttggccgcaggctcagagaagcgcatgaatgagctaaagccacaaagcgcggggctggaggtttggctcccaagaagcgaggaaatgggttcggaactcttctgccaagtcccagtagatctacccggtaaacttccggtgagtttccaacttccgtgcggggcagcagcttcggctggtcctaagcggaccggaagttcgtcaagtttcacgctccgcccctcttccggacgtgacgcaagggcggggttgccggaagaagtggcgaagttacttttgagggtatttgagtagcggcggtgtgtcaggggctaaagaggaggacgaagaaaagcagagcaagggaacccaggtaggtgcacccgagagtggggagacgcaggaggagccccgaacccggggcttctcggcgctccccgcgtactccgctctgcccccttctctccttccatttcctcccctcggtaattcgcgcctcccgcggctgtttccagggcaacaggagtagttcactccgcgagaggccgtccacgagacccccgcgcgcagccatgagccccgccccccgctgttgcttggagaggggcgggacctggagagaggtgcgagggcggagcatgaatggaggaggcggggcggggcatgatgggaggtgatggggcgggacctgcagcgcggtgcgggggcggggcatgaagggaggaggcggggctgggggcggggcatgatgggaggagatgtggcggggcctggagcgaggttgtgggggtgcagtaggaagggaggaggcggggcgggggcggggcatgatgggaggggatggggacctggagcgaggttgtgggggtgaggcttggagggagggatgcatatggggcggggcaaggtgttgggaggcccatgatgggggctttaggggctgaacctggaaggttgagggcggagcatagtaggaggaggtggggtcagaatgagaaatagggatgcttggggcagaagtgaggtagagtcttaagaagaggaggtggggggaaactacatggcatggaggccgtgaaggcagagcatgattaaaggagaatgggccctacctagaaaaagcaggtggattggacctgagggggcggggcctacagcaggggcggggcttaagaccaagctgaaggctggcgtggaacagaagggggcaggtcttgttagaaggatggggagggtttgtaggctggcaggaaccagggttgtggctgagagtagggtctttggagagatggaaaaaaaagggaaagccctgtcaggacctgtaactgacctaacctaacccttcttagccccacaaggctctcaatcccctgtattctacaggctgctccgtgaccccaccatgtcctctcctaccacgagttccctggatacccccctgcctggtgagtgactctcttccccacccagcccttatcacacacgagcagaagctcactgtacctctcccggattccaccctcttccaggaaatggcccccctcagcctggcgccccttcttcttcacccactgtaaaggaggagggtccggagccgtggcccgggggtccggaccctgatgtcccaggcactgatgaggccagctcagcctgcagcacagactggggtgagacagggccctggagttgatgtgggggcttggggaggggtttaggaagggagaaagaaatagaaatgggaatgggaggccctgatctttgctttttgttcttgctttctccttaacatatacatctttctaaattgcaatttccctgaatgtgagcagcaactcctctctccctccatcctctggctctttgcctggggatctcctgtgggcccatctctctggttcctgtttctccttgtggctttctcatggcctctacctacccaccccagtcatcccagatcccgaagaggaaccagagcgcaagcgaaagaagggcccagccccgaagatgctgggccacgagctttgccgtgtctgtggggacaaggcctccggcttccactacaacgtgctcagctgcgaaggctgcaagggcttcttccggcgcagtgtggtccgtggtggggccaggcgctatgcctgccggggtggcggaacctgccagatggacgctttcatgcggcgcaagtgccagcagtgccggctgcgcaagtgcaaggaggcagggatgagggagcagtgtgagtgcagcgggagggggcggtgccggcctggccccccgcctagccctggggttctgctgaggcctgcatccccctacaggcgtcctttctgaagaacagatccggaagaagaagattcggaaacagcagcaggagtcacagtcacagtcgcagtcacctgtggggccgcagggcagcagcagctcagcctctgggcctggggcttcccctggtggatctgaggcaggcagccagggctccggggaaggcgagggtgtccagctaacagcggctcaagaactaatgatccagcagttggtggcggcccaactgcagtgcaacaaacgctccttctccgaccagcccaaagtcacggtactgccccctccacaaccttgagtgtgacggtcccaatggggtagagccagctgggccatcacccagggtgtgggagaatgaggctccagagggcaggggctttgggaagaggatcccccagggtgcaggcttggcctcaaggtggccacccagacttaggctcacaaagacctgggagtgaccctggtctcctgtgtcccagccctggcccctgggcgcagacccccagtcccgagatgcccgccagcaacgctttgcccacttcacggagctggccatcatctcagtccaggagatcgtggacttcgctaagcaagtgcctggtttcctgcagctgggccgggaggaccagatcgccctcctgaaggcatccactatcgaggtaatggtccatctgcccacaaggaaccccagagatagctccaggacagatgctgggagcagagttaaggaagaccagtgcttgccgttgtaggatgacattccacggcgaatagagtcttctatgagccaaggagagaaaggaaaaagggtctgaggctgagaaaattgaggatcaggctagaggcgctattgcagagaaaagttgccaaaaaggcttttcagaggagttagcatttgaatcaaagtagggataacatataagtattgagcacgtgctgtatgccaggctctattccaagtgttggcatatggggcaaagaacaaagcagatcaaaccccgtgccccaaaccttgtgctcacctggggaaagagtatcctaaggagatggggatgcagcatgtgcggaagcctgaagtggagaaagagctcgggctgtctcacgtgatggctgcacgctggtgtggctgagagaacaggggggaaggggacaagggataatcctggtgagattagacccccatttgggccaggaggggagggactagcagctgaagggtcacagggctcaagctccccctcccgctgccgcccttagatcatgctgctagagacagccaggcgctacaaccacgagacagagtgtatcaccttcttgaaggacttcacctacagcaaggacgacttccaccgtgcaggtagggcccaggggaggcttcggggaggcttggcgcccctgctggctggaagacctggggccaactcatccctgttggagtctctgtttctttatctccaaagttggggtgagggttgagccaaggtgagagtgaggtaagagtgcatgtgccacgtgtggtggtgcacgccaatagtcccagccactcgaggctgaggagggcagattgcttgaggctatagtgagccgtgattgtgcgacggcattccagcctggtgacagagaagaccgtgtctctattttttaaaaaaagcatgtattgagtgccgactctgtacattgggttgcagtggaagttgagatgggaggagccctgttaccacatcaggcatcttggtgggcattaggaaaagcattccccgcccccgccaaaacgtggtctcacccaagggaggcgggctggagctcggtccattgtgaagcgggcagccttctttactgtctaggggagcactgcttcctgccctctgagagcgctaacctgcgtgggtgggcttctggaagaaggcctgggcagtgagaggcactgcctaggaaaagggtgggaggagcattgctagtgctgcagagcatgcaccagggcctcgctccctcattgtcccacaatctctgggggacctctctgtatttcccgacatctgtccaaaccccaccctctccccttcctcttactccggccctttcaccacccgagacggtcccagtaacccttttagtatgagcttagcagggcagggctgcagggaagcgtttctggcagaggagattggcgattgcagaggccctgaggttggggagagctggtggtttggaggaactacagggaggcccaggcagctggagcacaaggagatggggtggagaggaggtcgggaatcccaccctaccccttcccagccgctcctctgccaccaccctggaacactgccagggtccccttgaggggccgcctgcctccacccctgcctgatggggctgctcacagcacaggcagaagggtcctgtcagcacttaaggctgcccacttccctcctccgctcagaaccctccgcggctcccgtctcactgggagaagagctagagtcctctctgtggcccacaaagccctttaggacctggcctcgctcactctctgccctcagctctcaccctctccccctgttccagccactctggcctcttactggcacccatccagcatgctgcagccaagggcctgtgtacttggagtttcctctgcccagaactagggggaccaactggtcctagtttgcccaggaccttcccagttttaacactgaaagtctcatggcctgggtagcccccgtcccaagtcatgggaacagcagacgttggtcaccctcacaatccctcatctccttcggattggtcactgctccagcgtcacccagagcgcagccttccctgcccgccttgtgtaaaatagaaccatggctcagcagggcccttcacacttctctgcactgcctggttccattgaactcacagccctctgacaggctgggcctcttcctaatgtgtttgtctatgaccggtcccctaggctctcaaatgtaagtgctggagcctggcacgtggcaggtactcagtgacatttgatgactgaatgaacaagtcagttttgggaatgagtttgggctttaccttgagcagtggaagccagcgctgggaccagcacgatgtgacctaggttttaaaagcttccctttgcctttgtgaaggggacaagaatagggactcgggaagctgcagccaccgcccaggtgggaagggagggtggtgataggatagtagaaaatactgaagaaacatgcaccctcattcattccttcactgggcagcatgtgtggcacacctactacatgccagcactcatgggcacggggcacaggtggacagaaatgacaagaacgctgtaattactgctgtgttcccagccccagagactgtgggcagcgccagggtccaggatgtggggcacggtttcgggctgagggagtcacgggctgcctcccgccccgcaggcctgcaggtggagttcatcaaccccatcttcgagttctcgcgggccatgcggcggctgggcctggacgacgctgagtacgccctgctcatcgccatcaacatcttctcggccgaccggcccaacgtgcaggagccgggccgcgtggaggcgttgcagcagccctacgtggaggcgctgctgtcctacacgcgcatcaagaggccgcaggtagggccccgcagagcctctgcgcagagccaactacgtcccgcggcccacgtggtccgttcaggctgggttctgccagccacactgccctcccctccgcagagtctttcctcaggccccaccctgctcgactgggagccaggtctagtccaagcacagaggcgggccccacgctggctcccacgcctggtcggggaggggccctcctttctgttggggtgggcctcccaaagcctggcagggcaggggctcagccagcgcccacctgcctcctccctcaggaccagctgcgcttcccgcgcatgctcatgaagctggtgagcctgcgcacgctgagctctgtgcactcggagcaggtcttcgccttgcggctccaggacaagaagctgccgcctctgctgtcggagatctgggacgtccacgagtgaggggctggccacccagccccacagccttgcctgaccaccctccagcagatagacgccggcaccccttcctcttcctagggtggaaggggccctgggccgagcctgtagacctatcggctctcatcccttgggataagccccagtccaggtccaggaggctccctccctgcccagcgagtcttccagaaggggtgaaagggttgcaggtcccgaccactgacccttcccggctgccctccctccccagcttacacctcaagcccagcacgcagtgcaccttgaacagagggaggggaggacccatggctctcccccctagcccgggagaccagggccttcctcttcctctgcttttatttaataaaaactaaaaacagaaacaggaaaataaaatatgaatacaatccagcccggagctggagtgcaagatggagagggcgcgggcttctagggacctcagtgacactgggtgcccgaacctgattgagcaggtgggactgggtgtccccaggctgttgggaaaagggtggcacatagggtcccagtgttgggtggtgtgtcgcctgctgtgaaagttcaggacagaggcctcagcctcagggtcacctccctggacaaggtgaatcagaactcacccttgaaggataaacaggatttaagtgaatgaggggacctggacttctgtccgaacaacaagtgtttgctgaggcctcctgtgggccaggcactgggttggccattctagagatggagacattcacccaataaatgtttccagagcattaactacagttaggcacaattctaggcactggaaacatctgtgaacaagataaccatcctcctaccaagactcgggggatagggactttaatgagcgtggcactgtggtggggctagaggaaatcagggaaggtatcacaacagaggcaatcgctgggacctaaaacaagagcctgggggctgggcctccaagttgagggaacagcacgtgcaaagtttgaaaggagagacgccaggagttcggagcgaagcgacgaagttcctccaatccttcctgcccctgtgccagccctgaaggagctgaatgagcaattccaatcgagggcgaaaggggggttggatggagggatgcaacttaaaggtgtatttatttggggcggggaacagcggaagtgagagtagttaccaatgatcaccttatcctaagagtagtgtaccgggcgccccacaagtgtccctatcatgcgttgttgagtctaatttacgtatagggaaactgaagctaggatgaaggagaacagatcaagccaggactctaccgcttatcggccagcctctgcggggatcttgggcgtcaggtcaccagctggctgctgggcagcgacggggcagcgctccctacacggccccgggcgagaggcgggcggggggacgcggaggatgcgcgcgcaacacccgagggtgggaggagagagaacagaaccgcggcgcgcccagaccgcacgaggtcgtgaaggtagccgcgcggaggggcgtggcttcgggcagacaggtcatggggaggcggagttaagggaatttttcagcaagggggcgaggccacttcggaagctgagagagggggcggggcctgccctgcagtcgaacaagcggggcgtggccttgcccgcacttgggcaggcgggggcgtggcccgtctctgagcgccgcggctctgggcttgcgcgcgcgggagtcaggggtcacggcggcgtaggctgtggcgggaaacgctgtttgaagcgggtgagtagaggggaaaaagggagttcggggcagtgggcctggtagggaacggggcttgagcagccaggcacatagatctgagagacggttgcgagggcaccctttggcccgggggcgcgcaggagagggcaggggccaggggtttcctgggcgagggcgcggggacgagcaggaaaaggccggggtgggggtggaattcctcggcgggcagggggcgcatgcgccgggcaccgtggggcgggacgtggcccgggaggagctggggggactgggtggtgcacgtgcgggcttggtgtcatcctggattcgctgggtgtttgagtactctgtgccaggcacttttctggaagcaggaacaagtcagagaagtccctgtctcgggaagacagacggtagacaagtgatgagttttaatagatcagtaaagcagtgctctggggctgtgagatgctctcagaaggaaactaacgcagggtaacgtgataatgagcgaagagcctgttgctttagctggagtggtccagaatcgaccgctctgggaccctcaagtgcaaagccctgaggtggaaggagcttggcgtatttgtagcaggagccgaggggacgagagaaacacagatgaggtcggagtcatgatggggaactagatcctatagggccttgtaaaacttggtatggaatttctcctttattctaggttcagcggggagccgtgggagggtttgagcgtggaaacaacacgattcgccccatgttttgaaaaactcaccactgagtggaaattggattgtagcaggaataagaatggaaggagggagatctgttaggagggagagcgtcctgcaggcagagaatcaggctccggttacctttgcgggcggagacagggggactggctgatggactgggcgtaggagcaaggggaagagtccaggatgactcctgggtttgtggtttgagcagcaggctggatggggaaggctaagggagaagcaggttggggttgccgctctgaaggcaaagattagtgggggagtgagtgggcagggtttagagcggagccaggagtgggcagggcgatgtcagtgcctcgcctcagcccttccactgaaggaacttgttgccactgtcttctcttttttttttttttttttttgagacagagtcttgctctgtcacccaggctggaatgcagtggtgcaaactcagctcattgcaacctccgcctcccgagttcaggcgagtctcgtgcctcagcctcctgagtagctgggattacggcacccactgccatgcccagctcattttttgtatttttagtagagatggggtttcgccgtgttggccaggctggtctcgaactcctgacctcaggtgatccacttgcctcggcctcccaaagtgctgggattacaggcgtgagccaccacgcacggccgcttctcctccttcctgcacttcccccccacaggtctctcttccccctagagaggttccttccctccccctgaaatgctcttccctctcttatgtgtttctgacagctgctgtttggacaggccctctgctgagcactggggagccaatgatcattcagtttggttggggaaggacaggagatttcagtccagagtgcgctgagctatggcggagcagtgatagtctttgggagccaagagaagaacctgtgcgctcagggaagactcaccagagtggttgatattcacagggagtttcaactcacatgtctttttttttttggtttttgagacagggtcttgctctgtcgcccaggctggagtgcagtggcgcgatctcggctcactaacctccacctcccgggttcaagcgattctcatgcctcaggcttccgagtagctgggattacaggtgtgtgccaccacgcccagctaatttttgtatttttagtagagacagggttttgtcatgttgcccagactggtctcgaatccctgacctcaagtaatcctcccacctcggcctcccaaagtgctgggattacaggtgtgagccaccacacccggcctaaactcatgtcttgaagtaaccggacactgtgcagagtgatgctggagaccccaacttgggcaagatgctgactccttttctcaaggagctcacaggctgaaaggatcccagctctgcattgtgcaataacgaaagtggcacaaggcgttgtgggaaccctgaagggcagctggtcagcttggaggagctaagcctgagctgagtctctggatgcagtggagtttcatgcagcgaacactgcctaaggcctcctgggggcccaccctgtgctgggtgatgctaaggtcccagaggagagtcagtccttgctctgccatccagaggtccctggctggtaagggaggaagacacacacccaggcagtccagagacagcagtcacagaggcctaggggaaggacaaggccgaaagcatgcaggtgagcctgggcaacatagcaagaccctgtctctacaaaaaatacaaaagctaggccgggcgcggtggctaaggcctgtaatcccagcactttgggaggccgaggcgggcagatcatgaggtcaggagaccaagaccatcctggctaacacggtgaaaccccgtctctactaaaaatacaaaaaattagccgggcgtggtggtgggcgcctgtaatcccagcactttgggaggccgaggtggacggatcacttgaggtgaggagtttgagaccagtctggcagacatggtgaaactctactaaaaatacacaactagctggacatggtgggcgcctgtaatcccagctacctgcgaggctgaggcaggagaatcacttgagtccaggaggcggaggttgcagtgagcaagatcctttcccaaaaaaatatataaataaaaataaagctgtgagattgggcaagattggatgaggtcattgaggaaatgagtgtctcactcatcgagaaaactggtgtctggcctgcagcgagcacgtggtgtcattttgttgctgaatctctgttaagtgcttgctaccgaagggtcgtgagaggggcagaggacagtgtttgccaagctctcatcctgtgccagggccaatgagaggggacacacaggggcctttccttcctaatgctgctgtgcctccactaacaagagcccaggttttgcccctggtgacaccgtccctcccaccgcacccccgcagccacagccaactgaccaagggcagccagtcagctccttccttcctcctccagcttcagcactgactctgggctcccacaagcccctgcgcttcctctgtcccacccgggtctctcctcgcagatcatcactccctgtccctctctggctacttgcacaacccgaagccagagccgctaacgacgcttgcttcttcctgtaagtcacacatgtacgcggttgtcacccaaagagcacaaacgcagtcaaagtcttcctcacacaaaaccccctgcacacgctcacggctgcaccactcacaaaaggtggaagcaaccctaatgtccatccactgatgaagggatacgtcagacgtgttctagccatacagcggaaaagtactcagcaaaaaagggacacagcactgacgaaaggccgccacacacatgagcgatgaacacattcagagaaagcagccagacacaagaggctgcatattccaagatcccatttataggaaatgcccagaataggcagatccatggagacagaaagttagatgagtggctgccaggggtgggggcagatgggctgaatgcagggagagagctaaaggatttaggctttttggggtgatgagagagttctaaaattgactgtggtgatggttgcctaactctgaacatactaaataccattgaactatatatactttaaatgggtgaattgtatagtatgtgaattatagctcaataaagcagttagcaaatgaagtcttctaccctgtcccccaggaaaccagtttcttagctctccttatagaatgatgcattaaaagcaaatagatttatacatatgccctgcattacaataaaaaagacgtctacatactccctgcattacaataaaaaagacgtctacatactccctgcattaaaagcaaaaagatttctacatactcttctgcccaccttgtaaatttgttactattttcattttatatatttcccccttaatattttgaaaagtttcaaacctgcagagaaggtacaaattgagtacagtgaacagccatggccctttgcctagattcactggctgttggcatgacacctcatttgctttatgctttatccaagcacatgcatatacctgtaccttttgtcctttttttggctgaactatttgaaagttgtggtcatcatgatacttcacctctgaaaactccagcagttaactctttttttttttttttttttttttttgagacggagtcttgctctgtcacccaggctggagtacagtggtgcgaccttggctcactgcaacctctgcctcccaggttcaagcgattctcctattgcagcttcctgagtagctgggactataggcgcgcaccaccacatctggctaatttttgtatttttagtaaagatggggtttcaccatctttgccaggctgctcttgaactcctgaccttatgatctacgtgcctctgcctcccagagtgctgggattacaggcatgagccaccgcacctggcctctttttttttttttggtacagtattttactctgtcatgcaggttgtagtgcagtggggtggtcacagctcactgcagcctcgacctccccaggctcagctgatcctcagcctctcgagtagctgggactaaaggtgtgtgccaccacaccctgctaatttttatattgtttatagagacagggtgtcaccatgttgcctaggctgatctcaaactcctgggttcaagcaatccccctgcctcggcctccaaatgtcctgggattacagccgtgagccaccgtacctggcctccagcagtcagctcttaagaacagggatgtccgcctgcagaactacagtgtcattgtcatcatcatgcagtttaacatgagacagtgacgttattgaatagacgattcttatttagatctgccacgtgtccctgtaatattcttcaaggctataaataatttcttattttttttttttttccaagactgagtcttgctctatcgcccaggctggagtgcagtggcactatctcggctcactgcaacctctgcctcctgggttcaagccattctcttgcctcagcctcccgaatagctggaattacaggcatgcaccaccacgcccggctaatttttttgtattttttgtagagacggggtttcattttggccaggctggtctcgaacccctgacctcaggtgatccgcccgccttgggctcccaaagtgctaggattacaggcgtgagccaccatgtccagcctgtttttttttttgttttttgttttgttttttttttcttttttgaaacagagcctcattgtcacccaggctggagtgcagtggtgcgatcttggctcactgcaacctccacctcccaggttcaatcaattctcctgcctcagcctcccgagtagctaggattacaggcgcctggcaccacgcccagctaatttttatatttttagtagagacagggtttcaccatgttggccaggctggtctcaaactcttgacctcaggtaatccacccacctcagcctctcatagtgttgggattacaggtgtgagccactgcgcctggccaataatttctttttttcttttcttttcttttttttttttcaagttacatgaagtaaatttattatttacagctaggcaacaagggaaaaccgaagcataggattcattgtgagccaatctcccgagactcaggaaggttgccccgggaggatggagtctcatttgtgtgtaccccatttgtacctggaaagcagaccatcttgggttttatattctggaggcaacatgacatgttgggctaaaatgatgaaggacatcctgtttctaggagggactggaacagagcctgggctgtttcagccagtccctccttatctcaggatattgcattcctagcacattctacagttattcttgagaactattttttttttttttttagtatttattgatcattcttgggtgtttcttggagagggggatttggcagggtcataggacaatagtggagggaaggtcagcagataaacaagtgaacaaaagtctctggttttcctaggcagagggccctgcggccttccgcagtgtttgtgtccctgggtacttgagattagggagtggtgatgactcttaaggagcatgctgccttcaagcatctgtttaacaaagcacatcttgcaccgcccttaatccatttaaccctgagtggacacagcacatgtttcagagagcacggggttgggggtaaggccgtagattaacagcatcccaaggcagaatttttcttagtacagaacaaaatggagtctcctatgtctacttctttctacacagacacagcaacaatctgatctctctttcctttcccatttcccccttttctattcgacaaaaccgccatcgtcatcatggcccgttctcaatgagctgctgggtacacctcccagacggggtggcggccaggcagaggcgctcctcacatcccagacggggcgtcggggcagaggcgctccccacatctcagacgatgagcagccgggcagagacgctcctcacttcctagacgggatggcggctgggaagaggcgctcctcacttcccagactgggcggccaggcagagatgctcctcacttcccagacggggtggcggccgggcagaggctgcaatctcggcactttgggaggccaaggcaggcggctgggaggtggaggttgtagcgagccgagatcacgccactgcactccagcctgggcaccattgagcactgagtgagcgagactccgtctgcaatcccggcacctcgggaggcccaggcgggcagatcactcgcggtcaggagctggagaccagcccggccaacacggcgaaaccccgtctccaccaaaaaatacaaaaaccagtcaggcatggcggtgcgtgcctgcaatcccaggcactcagcaggctgaggcaggagaatcaggcagggaggttgccgtgagccgagatggcggcagcacagtccagcctcagctcggcatcagagggagactgagaggggggagggggagggggagggagagggagaggtctttttttttcccactcccccgctcttgttgcccgggctggagtgcaatggcgcaatcttggctcactgcaacctccgcctcccaggttcaagcgattctcctgcctcagcctcccaagtagctgggattataggcgcccgccaccatgacaagctaatttttgtattttttttagtatagacggggttttcaccacgttggccaggctggtcttaatctcctgacctcaggtgatcggcctgcctcagcctcccaaagtgctaggattacaggcgtgagccactgcacctggcccatcattttacttttttaatccaagttctaacctaggataacacacattgtcatggcaactttttcattttttaagacatgtcttgctctcttgcccagactgtattgcagtggtgcagtcatggctcactgcagccttcacctcccaggttcaagtgatcctcccacctcagtctcccaagtagctgggactgtaggtatgcaccaccatgcttaagtaatttttaattttttgtagagattgactaatttttaattttttgtagaaatggagtctcaccatgttgcctaggctagtttctaactcctggcctcaagtgatcatcccacctcagcctcccaaagtgttgggattacagacgtgagcctcctagcccaggcaacttactttttcatgacatcgacagttttaaagattacagaccagtgttgtcacccctcaccttggattcgtttgtttctttttcttgttttgttttgagacagagtcttgctctgtcacccaggctggagtgcagtggcgtgatcgcagctcactgcaacctctgcctcccaggttcaagtgattctcctgcctcagcctcccaagtagctggtattacaggcacccaccaccacgcctggctaatttttgtattttagtagagatggggtttcaccatgttggtcaggctggtctggaactcttgacctcaagtgatccaccctccttggcctcccaaaatgctgggattacaggcgtgagccactgcacccaggctgtttgtttcttaatgactagaatcagggtaaacgttttcttagacattgtttttcaacacaaaagataaaattgtgagtgcaccactgtgcatcttgctttatctactgaacaatgcctctttgagaaccttccctatcagtacacaaagagcttcctcattcctttacacagttgcatagtattccattgaacggacttaacatatttaaatagccccctgggggaggacagttaggtggtttccagtccttggggatttcaaacgatgcttccggaaataaccttataaatgcagtttttcttatgtgataatatatctacagtgtacgtccctagatgtggaattgagcctccaaacttttatgtttataattgaggtggcatttacatggcgtgccatgcccaggtctccagtgtacagtcagctgtatagtgtgttttatcaccccagaaaccccctcatacccttcccagtctctcctaccctaggagcagccactagtctgatttctagcgctgtagatcactttagtgtattctacaactttgtctaaatggtattgtacaatttttatggaggtaaaattagccattttaaagcaaacaatggctgggcgtggtggttcatacctgtaatcccagcactttggggaggccaaggcaggcagatcacttgagcccaggggtttcagaccagcctcagcaacatggcaaaacccgtctttaccaaaaaacaattggctaggcatggtggcacgcatctgtcttcataactactcaggaggccaaggtgggaggatcacctgagcccgggaggtcaaggctgcagtgagctgagatcatgccactgcactctagcctgggcaacagagtgagatcctgtctcaataaagagagaaagtaataataaagcaaagaattcagttggtacgttcacagtgttgtacaaccattacctctgtctagtttcaaaacatttcatcacccctacagaaaaccccatactccgtaagcagtcactcctcattcccccagtgtgcactttgccttctgcacagcctgctttcaagattcatccgtgttgcatgtctgtcaggagctggcccctctctaatgctgagtgtctgttatgaacctccctgaacatttctaacatatactccatcagttcagaatttttccatgcttatttcaggtctaagctgttgtaccaaggagcccccaaaacacagtggcccaagaaagatacaaattgatttctccacataacgctttggaagataggcaagtgtgcagggttggcagacagctttgctctggaaggttgttggggagcccagtgttgtccctgtccttgtggttggctctcccactacatccatgttccagccactgtgacggggaagagggtgggaggatgtcccagtagctgcacacctcatgatcactctcattcctggagggagaacttagtcacgtggccctcctggcagcgcacactgggaaatgtagcctttggctgggcagcctgtggccactccggacacgcagggttggaggggtgtgttctattgcaaaaaagcaaagcaaagccgggcgcggtggctcacacccataatcccagcactttgggaggccgaggcgggcggatcatctgaggtcaggagttccacaccagcctggccaacatggtgaaaccccatctctactaaaaatacaaaaaaaaattagcgggtatgatggtggacgcctgtaatcccagctactcgggaggctgaggcaggagaatcgcttgaagccaggaggcgaaggttgcagtgagccgagatcagccactgcattccagcctgtgtgaccgagtgagactccgtctaaaaaaaaaataagtaaaataaaaaggcaaaatgaggactggatatggggcaaccgttatgagatccagggatagacagctgacctgctcacctgcctcttcccagccgcatctaggatctgccctaggttccagtaatcccctctgtctcagcctggaccctgggggacaagtactttgtttttgtttgtttgttttttgagacagaatttcacccttgttgcccaggctggagtgcaatggcgcagtcttggctcactgcaacctctacctcccaggttcaagggattctcctgcctcagcctcccaagtagctggggttccaggtgtgcgccaccatgcccagctaattttttttttttttttttttagtagagacagggtttcaccatgttgataaggctggtctcaaacaactgacctcaagtgatccacccgcctcggcctctcaaagtgctgggattataggtgcgagccacggtgcccagctgggtacaggtactttttaaaaacttctttctctgacaatttcaaattaacaggaaggttgaaagaataaatagtgtaggccgggcgcggtggctgggtacaggtactttttaaaaacttctttctctgacaatttcaaattaacaggaaggttgaaagaataaatagtgtaggccgggcgcggtggctcacacctataatcccagcacttcgggaggccgaggcgggcggatcacgaggtcaggagattgagaccacagtgaaaccccgtctctactaaaaatacaaaaaaattaggcgggcgcagtggcggacgcctgtagtcccagctactcaggaggctgaggcgggagaatggcgtgaacccgggaggcggagcttgcagtgagccgagatcgcgccaccgcactccagcctgggagacagagcgagactccgtctccaaaaaaaaaaaaaaatagtgtaaagaacacctgcacgccctttgcccagatcacctgtttcaacattctgtcctatttatgatttgcatggatgtttcttatctcccttctctctgtatacgtacactcactttttacaaagaattcccaataccttgcagacattatggccgtttactcctaaatacttgagtgtgtatctccttagaatattcttattgaaccacaataaagtcacccacttaagtttaacctgcatataaccttgtctaatcaaccagaggatatatactttttttttttttttttttttttttgagacagggtattgccatcttgtccagtccagtcttaaactcctgggctcaagcgatcctcccaccttggcctcccaaagtgctgagattacaggcataagccactatgcccagtgaacttttttgttgtggttgtttttttgtttgtttgtttgggttttaattgttgttgttggtggtggtttttttttgtttttttttttgagacagaatattgctgtgttgcccaggctaaagtgcagtggcgcgatctcggctcactgcaacctccacctctcgggttcaagtgattctcctgcctcggcctcccgagtagccataattacaggtgtgtaccgccacacccagctaatttttttgtatttttattaaagatagggtttcaccatgttgaccaggctggtctcgaactcctgacctcaagtgatccacccgcctcagcttcccaaagtgctgggattacagcgtgggccaccgtgcctaactctagtcaacttttatattgtatatcttgtacattgtatatcttgtcaaggatattgtatatcttgtcaaaatacacccccaaaataataatatatatatatattttttgagatggagtctcgctctgttgcccaggctggagtgcagtggtgcaatctcagctcactgcatgctctgcctcctgggttcacaccattctcctgcctcagcctcatgagtagctgggactacaggcgcccaccaccatgcccggctaatttttttgtatttttttagtagagacggggtttcaccatgttagccaggatggtctcgatctcctgacctcatgattcacctgcctcctaaagtgctgggattacaggtgtgagccactgctcccagcctccaaaataatcttttataggttgtaattaagaaaacacaggccaggcttggtggcttacgcctgtaatcccagcactttgggaggccgaggcaggtggatcacctgaggtcaggagttcaagaccaggatggccaacatggcgaaaccctgtctctactaaaatacaaaaattagccaggcatggtggtgggcacctgtgatcccagctactcaggaggctgaggcaggagaatctcttgaatctgggaggcggaggttgcagccaagatcgcaccactgcactccagcctgggtgacagagcgagactccatctcaaaaaaaaaaaaaaaaagaaaacacaggccaggcttggtggctcacgcctgaaatctcagcactttgggaggccaaggcaggtggatcacttgaggtcaggagttcaagaccagcctggccaacatggtgaaaccccgtctctactaaaaatacaaaaattagctgggcatggtggcgcgtgcttgtaatcccagctacttgggaggctgaggcagaagaattgcttgaactgggtcccgggaagcggaagttgcagtgaatcgagattgtgccactgtactccagcctgggcaacaagagtgagattctgtctttttttttttttttttctgagacggagtcttgctctgtggcccaggatggagtacaatggcacgatctcggctcactgcaacctccgcctcccaggttcaagcaattctcctgtctcagcctcctgagtagctgggattacaggcgcctgctacctcacctggctaatttttgtatttttagtggagatggggtttcaccatgttggtcaggctggtctcgaactcctgacctcgtgatccgcccaccttggcctcccaaagtgctgggattacaggcgtgagccatcacacccggccctgattatgtctttaaaagaaagaaaaagaaaacacaaatatatataagtagcagtctgtatgtgttttgtgttgtgttttgtttgctactgtgggtcctggactcggggagaaagcaggttactataaacggcattttggagacagttggagaaattgggaaaggtgccctttattttatatcaaccttgagtcagtgttaaatgtcctagattgtatcgtactgtgctcggtgaaaggaattccttattgttaggcactacgtgctaacatgtggaggggtatgggatctgcaaggaactctcaaattactcaggaaaagaagtaacaatatgatgtgcataccgcacatgtgggagggcagagagaggcggtgagagagcacacacacgacacgctgaccaccggggagcctggggaagggcatacaggagttctaggcatttgagattatttcaaagtatttaggttggtgcaaaagtaattgcagtttttgtcatttcaatggcagatggcctgggcagatgggtggttggtaggcgaggtatcggagacagaggtttatggaaaataaagagatgtgccaaggccgggcgcggagactcaggcctgtaatctcagcactttgggaggctgaggcgagtggatcacctgaggtcaggagttcgagaccagcctggccaacatggcaaaaccccgtctctactcaaaacacaaaaattagctgggtgtggtggtgggcgcctgtaatcccagctactcgggaggctgaggggagaatcgcttgaacctgggaggtagagcttgcagtgagccgagatcatgccattgcactccagcctgggtgacaagagcacaattccatctcaaaaaaaaaaaaaaaaaaaaaagcaagagatgtgctaaggacctagtgtgatgggagagagggtcggggagtcgacggggctgctgctgcagtagctaacaattgagcgtctggaatgtgctcccaccccactgcctgcagggtgcagagagctatgttagtacagccagtccagagtaggaaaaggctcgtggtcatggtgggtgcatgggatgccatggagacagggtaagaggtgtctccggtcagaacctccaccaagctccaacttgcccagcaggatggatggcaagcggcggccaggcccagggcccggggtgcccccaaagcgggcccgtgggggcctctgggatgatgatgatgcacctcggccatcccaattcgaggaggacctggcactgatggaggagatggaggcagaacacaggctgcaggagcaggaggaggaggagctgcagtcagtcctggagggggttgcagacggtaaggcttggagttggaggttcctgctgcccaacccattgcccctggtcttgcctttggtccaagagtcagctgcaaagctgacctgtgaccccactctggccaattttgaatcctacaaaggactgcccttccaccccgtgcagcctgtgtggcctacagtgattctggccctgacccttgaccctcattctcttccaagtttcctgcctgacccagaccaccacctctgcctggctcctttcagaaccacatgccatcctggccggggaagaccatgactccatgtactccacttccttcccttcccccaccagggcaggtcccaccatcagccatagatcctcgctggcttcggcccacaccaccagcgctggacccccagacagagcccctcatcttccaacagttggagattgaccattatgtgggtgagtttaggggttatgggtgagtgctggggccctgcgctcctggggcagaggccgggccaggtcagcccctctggccctgtgctcctggggcagaggccgggccaggtcagcccctctggctctgcccctctggttgccatagagctgtagtgacagaacagaccagtgggtgccaggggttgtggagtgcgaagcgaaggtgacacagggtcagcttgagggaggtgcttggagcgttgatctgttttgcatacgtagtagctgcagcctgtgcaaggacctctgtgccttaaaattcataacaccagacacataaaccaaaagtcaatttgacttcttttttttgagatggagtcttgccctgttgcccaggctggagtgcagtggtgtgatctcggctcactgcaacctctgcctcccgggttcaagtgattctcctgcctcagcctcccaagtagctgggattacaggtgcacaccaccatgcctggctaatttttgtatttttagtagagatgggcttttgccaagttggctaggctggtcttgaactcctgacctcaagtgatccacccgccttggcctcccaaagtgcttagattacaggtgtgagccattgtgccagcccaatttgactttttaaaagattttttttttttttttttttttttttttgagacaagattttcctctgttgcccaggctggagtgcacctggccaataattttttttttttttttttttttttttaagatggagtcttgctcctgtcgcccaggctggagtgcagtggcacactcttggctcactataacctccgcctcctgggttcaagtgatccttcttcctcagcctcccaagtagctgggattacaggcgcccgccatcacgcccggctaatttttatatttttagtagagacagggtttcgccatgttggccaggctggtttcaaactcctaacctcaggtgatctgccgaccttggcctcccaaagtgctgggattacaggagtgagtaactgtgccccgcctattttttttttttttttttttttttttttgagacagagtctccctctgtcacccaggctggagagcagtggcacaatcatggttcactgtaacctcaacctccagggctcaagtgatcctcccacctcagcctcggagtagctaggactacaggtgtgcaccacaatgtctggctaactttttttttttttttgagacggagtcttgctctgtcacctaggctggagtgcagtggcgcgatctcggctcactgcaagctctgcctcccaggttcacgccattctcctgcctcagcctcccgagttgctgggactacaggcacccgccccaactcctggctaattttttgtatttttagtagagatggggtttcaccgttttagccaggatggtcttgatctcctgacctcgtgatccgcccgcctcagcctcccaaagtgctgagattacaggcttgagccaccgcgcccggcctggctaacttttaaaaatatacttttgggcccggcatggtggctcacttttggaggctgaggcaggctgatcacttgaggacaggagttcaagaccagcctggccaacatggtgaaaccccgtctctactaaaaattcaaaaaattagccaggtgtggtggcatgggcctgtaatctcagctgttcaggtggctgaggcacaagaatcctttcaacctgggaggtggttgaaatataaatataagatatatatatatgatatattctttatgtattaatttatgtataacatatattatatattaatatattttgtagagacaaatatatttatttgtacatataatatgtgtgtgtatttgtgtatatgtgtatatatatatatatatatatatattttttttttttttttttttttttcttttttttgagactgggtctcgctcttttgcccaggctggtctcaaagtcctgggctctagcgatcctcccgccttggcctcacaaagcactggaatcacaggtgtgagtcactgtgcacggccagttgtttttatcttgtaataaaaaagaagggcctccctgtagttgtgctgtggagaatggatcctgggggatgaggctggagatgggaaccaggggggaggctgaaatggacacagggaacggtacaggggcaggagtgccccaggctgcaggccccaaggtatttcgaggctgtggagacacaccttggaggaccctgagaggcatggccgctgtcttaccctgtgaccccacaggcccagcgcagcctgtgcctggggggcccccaccatcccgcggctccgtgcctgtgctccgcgccttcggggtcaccgatgaggggttctctgtctgctgccacatccacggcttcgctccctacttctacaccccagcgccccctggtgagtggcccctacccagcccctccctgagccactggagccccctgcacctctgatcatccctcccacaccaggtttcgggcccgagcacatgggtgacctgcaacgggagctgaacttggccatcagccgggacagtcgcggggggagggagctgactgggccggccgtgctggctgtggaactgtgctcccgagagagtgagtgctcccccaggatcagcgggttggagggtcccctcgggaggccattggctggtcccagcttcttccatccacaggcatgtttgggtaccacgggcacggcccctccccgttcctgcgcatcaccgtggcgctgccgcgcctcgtggccccggcccgccgtctcctggaacagggcatccgtgtggcaggcctgggcacgcccagcttcgcgccctacgaggccaacgtcgactttgagatccggtacggcctctgcctcacttctccggcctctatccccaccctcgggcagcccctgtccactgacccccagccccctccaggttcatggtggacacggacatcgtcggctgcaactggctggagctcccagctgggaaatacgccctgaggctgaaggagaaggtgcagggcttcccagggcagggctgggtggggagctggtaccctgctgccaccgctgacccacccatgcccacaggctacgcagtgccagctggaggcggacgtgctgtggtctgacgtggtcagtcacccaccggaagggccatggcagcgcattgcgcccttgcgcgtgctcagcttcgatatcgagtgcgccggccgcaaaggtctgtccccgggcccgggctcctgcccgcctcattgatgtgccaagtcgggggtcggaaaggcaggtccggtggagggaatggcaagcatgaaggtgccggggcaggagcaccccagcccatgtggccagatggagtgagcacagagggtgtggagatggcctggaggtgagagcagagcaggagccagggtgagccacgtagggccggcaggcagcggggacagccccggggagatggcaggtgcagcctccctgctgtgttgggagtgaggggcaggagtcaggcccctgcatcctcctgcctcgcaggcatcttccctgagcctgagcgggaccctgtcatccagatctgctcgctgggcctgcgctggggggagccggagcccttcctacgcctggcgctcaccctgcggccctgtgcccccatcctgggtgccaaggtgcagagctacgagaaggaggaggacctgctgcaggtagctctcgctccacgccccacaccatttcccggggtccccgccagcctccgcgtcctgagccatcagctcctgggtgctgcgacgcccatgtctgtgggtctgggtgggtgtctgtgggtctgggtgggcccctgtgcaattaggcttgagcacttcccctctgggttctgcaggattttcaggggtggctggggttctagaacattctggaagtaggggaatccgaggcagggcaaccaccagggtgacccaatgtgctcccacccccaggcctggtccaccttcatccgtatcatggaccccgacgtgatcaccggttacaacatccagaacttcgaccttccgtacctcatctctcgggcccagaccctcaaggtgagggctgggcaggtgggaggcttctctcagatgccccaggtgtggcctccgggccctgggcctccttcccactccctctccacatggcttggtgcatcttgctctgtgtgcctcagccgattgcctgcaggggcagcctaggcctggtcctgccctgctccaagtcgaaaaagttactgtggcttttatcagaggcaaggagggcgttacggtggagtaagagaaggctgtgcattcaaggtcggcctgaagcttgcaggggttcaacaagccatgaagcagccactgaatcccagtcttcctttaggttatatcagcataaggaaaagaatcataatggaggaggaggggggagtgtgttgactgatggggcaaattccggatgcttcttgagtctgcatgtgtgtaagggtggattcctctgcccgagttgctgtaacaaagagccacagaccaggtggctgaaaacagcaaaaagtcattgtctcaccgtcctgaaggctggaaagtccatgaccaaagtgtcagcgggcctgcttccttcgggggctgcaagggaggactggttcacggcctctctccttggcttgcagacggccatcatccccctgtgcctcttcacaccgtcttctctctgtgcgtgtctgtttccacatgtcctcccttttttttttttttccaagacaaagtctcgctctgtcgcccaggctggagtgcagtggcgcaatcttggctcactgcaaactccgcctcccaggttcatgccattctcctgcctcagcctcccaagtagctgggactacaggcgcccgccaccacgcctggctaattttttgtgtttttagtagagacggggtttcactgtgttagcgaggatggtcttgatctcctgaccttgtgatccgtctgcctcggcctcccaaagtgttgggattataggcgtgagctactgcacccaaccccttttctctttcttttttttttttttttttttttgagacagagtctcgctgtgtcgcccaggctggagtgcgatggcacgatcgaggctcactgcaacctccacctcccaggttcaagcgattctcctgcctcagcctcccaagtagctgggattacaggcgtgagccaccacgccccgcaaatttttgcttttttgttattgtttcttgagatggaatttcgctcttgttgcccaggctggagtgcaatggcacgatcttggctcaccacaacctccgcctcccagggggcgctggggtgtagaagtgattctcctgcctcagcctcccaagtagctgggattataggcacccgcttccatgcccgactaattttgtatttttagtagacagggtttctccatgttggccaggctggtctcgaactcccaatctcaggtgatctgcccacttcggcctcccaaagtgctgggattacaggcgtgagccaccgcgcctggcctatttttgtttttgtttttgttttttttagcagagactaggtttcatcatgttggccaggctggtctccatcctcacctcaggtgatctgcccacctcagcctctcaaagtgctgggattacaggtgtgagccagtgcacctagcccacatgtcctctttgtgtagtgacaccgtcgtgaggtgagggcccaccccagtgacctcatcttcacttgaccccctgcgaagacatatttccaaatgaggttacattctgaggtgccgggggttagggcttcaacatcttttgggagaacatggttcagcccttaatgagatatattgccttattttcctgcttttctctatgtctggccagcttggtaatggaaaaacaaaacaggctgggtgtggtggctcacgcctctaatcccagcactttgggaggatgaggcgagaggatcgatggagcccaggagttcaagaccagccagggcaacatagcaagaccctgcctctattaaagagaaaacaagaaaaaatccattctaaaatacagaacaaactcttaggacccccagtgtatattccacagcgtggcgctgatgcccgggccatggtactcctcctccccttccctgggtgtccctcaccctctgccctgtccccagctcaggcttcttctggcctcagtctcccccaggctgggccccagcaccctgcaaggcctcctgcagccaggcgccctccagcgccctcagcatccatctcagcccagctccacgccgcctcctgcctctgcccccacctggccgcctgctcacagtgtccccaaatctcttcctgtttcctgcctaggtacagcccgcagacactgggctccatccttggcccccagtccatcagggcccctgactctcgctatcccagccttggctgcagcttagtccttactccggactccctccccagtctccagccacccacacccagccccagaccgtctttctgcccccagggttgctctcgaccccctagggttgttataaggatgttgtggttggtctcaatctccgttcttcaggcttatgtgacggggacccgcagcctgctgcacaccctgcctctcctcctcaggtacaaacattccctttcctgggccgtgtggccggcctttgctccaacatccgggactcttcattccagtccaagcagacgggccggcgggacaccaaggttgtcagcatggtgggccgcgtgcagatggacatgctgcaggtatgggcgggaggtggggtgtgtccctgtccttggaaggccactgcccaggcccgcagcccaccagcccacccacccacctaggtgctgctgcgggagtacaagctccgctcctacacgctcaatgccgtgagcttccacttcctgggcgagcagaaggaggacgtgcagcacagcatcatcaccgacctgcaggtgcctgctgcctccctgacctctcaccccaacctctgacctccacctcacccttccccggcctctgacctcaacttcacgcccccacgtctgacctcactctttgacctgctgttatgacctgtgaccttacctgacgcccactttttcctgacctctgaccccagatttctctccactcctgtgacctctgtcactatgaccttgtctctgctttcctggcctgaccacaggtccacggtggccttcaggctgctccctcctcctccctctggccctgtggactccctggcccccaaccctacctccatccccacccagaccctgacgacttggagggccctcctgcccgcctcacctcccaggccctccccaggctacctcaccctgacccccacttccttctcctgctccacctcccacccccaacccctggtccctgaccccatccgtgcccatccccagaatgggaacgaccagacccgccgccgcctggctgtgtactgcctgaaggatgcctacctgccactgcggctgctggagcggctcatggtgctggtgaacgccgtggagatggcgagggtcactggcgtgcccctcagctacctgctcagtcgtggccagcaggtcaaggtcgtatcccagctgttgcggcaggtcagtagccgagacttgtcctcgccaccccccaccaggcacgtctgtggccccctccaggcaatggcatcctggatgcactttttctccccactcccaatccgcacggccccacctatacccactccatttcccaccttctcccctcccaggccatgcacgaggggctgctgatgcccgtggtgaagtcagagggcggcgaggactacacgggagccactgtcatcgagcccctcaaagggtgaggccccaggctgggtgcagtttttacctgtaatctctgggaggctgaggtgggaggatcacttgagctcaggagtttgagaccagccagggcaacatagcgaggcccctgctccacaaaatttttttatttttatttatttttatttttatttttttgagacagagtctcgctctgtcacccaggctggagtgcagtggcgcaatctcagctcactgcaagctttgcctcccgggttcacgccattctcctacctcagtctccacagcagctgggactacaggcgcccaccaccacgcctggctaatttttttttttttttttttttttgcatttttagtagggacggggtttcaccgtgttagccaggatggtctcgatctgacctcgtgatccacctgcctcggcctcccaaagtgctgggattataggcgtgagccaccgtgcccggccgaaaaaatttttaaaaattagccaggcgtggtggtgcatgcctgtaatcccagctacttgggaggctgagctgggaggatgatgagcccaggaggtggaggctgcagtgagcgatgattgcgccactgccctccagcctgggcgacagagcaacaccccggccctaaaataaattaataggccaggcacggtggctcacccctgtaatcaatcccagcactttgggaggtcaaggcaggcggatcacaagttcaggagattgggaccatcctggctaacacggtgaaaccccgtctctactaaaaatacagaaattagctgggcatggtggcgggcgcctgcagtgccagctactcgggaggctgaggcagaagaatcgcttgaacccgggaggtggaggttgcagtgagctgagattgcgccactgcactccagcctgggtgacaaagcgagactccgtctcaaaaaaaataaaataaaataaaatagtagattaattatatatattatttttctttttctttttctttttttgacacagggtctcactctgtcacccagggtggagtgcggtggcatgatcttggcttactccacctcctaggctcaagcaatcctcctgcctcaggcccctgagtagctgggaccacaggcgtgcaccaccacacctggctaatttttaaaatttttttgtagagatagggttttgccatgttgcccaggctgatctgaaactcctgagttcaagcgatcctcctgcctcagcctcccaatgtgctgggattgcaggagcgagcactgctcccagccaatgaatgattttttttttttaaagggtgaggccacaagacagggcgggggcggcatgggaactcctagccctgactcccggccgcggctgctcccctcccaggtactacgacgtccccatcgccaccctggacttctcctcgctgtacccgtccatcatgatggcccacaacctgtgttacaccacgctccttcggcccgggactgcacagaaactggggtatagtgcccaattcagcatgtgtcccccgaggcccatctgggccttcccttggggggctcagtctggtggggggcataggcacaggcccagagatagtagggagtggaggggtgcttgaggggcctgcgtgtgctcatggccaaggccaggaccgtagggcagaggtgggctggagcaggagggtggccggcagtcaccccaacatcttccaacccagcctgactgaggatcagttcatcaggacccccaccggggacgagtttgtgaagacctcagtgcggaaggggctgctgccccagatcctggagaacctgctcagtgcccggaagaggtgagccctggagatcgcctgcttggagctcagacctgttggggcctctgggcaatccctgtccctcactgggacaccccagggctgcccagccaccctgccctcagctgtgcgtgaattagcacaaggcatcccctcctggcagcttccttttgcccccttggccagaagcttctgtgcagtgcacagtacgcccaaccgtacatggcactcacttccagaaaggagccctgaccaatgcccaggtgccgcctgagtgtgctttccccgtgttccctcgcagggccaaggccgagctggccaaggagacagaccccctccggcgccaggtcctggatggacggcagctggcgctgaaggtgagcgccaactccgtatacggcttcactggcgcccaggtgggcaagttgccgtgcctggagatctcacaggtgggcactcgggcccctggaaggcaactgggggcaggtgggccccctgtgtaggagaccagggctccatgtgggggacctgtatccagaggactgggcaccccaactcactggccttctagagagaggatgccaatgtggcttgagcaattggtccattccttcactcagcaaatgcctactgagcacacactgtggtcagggctcactctgtgccctggggatacagaggggaacaaaatggatgagagctcctgtccctgtcatcttgcagcccagtggggacactgacaggtctgtgtaaacgtgtttaggacacaagtggcgctacgagctttgcagccggataaagcaggaggtgcggactgtcggggagtgatggggctgggcgggactcacccctctcaataggcgacgctcacacagaggccaagggacgtggggagggaagccattcaccgtccccacggcagcgtcccggtctgcctacccacggcagctctgctgcttgaacagaaaaacagattctttgaaaccacagagggcctgagtttccgagattgccaagctggggtcagtgccccagctcctggcatatgagggcctcggaagggtcttcctgtccagccttctcccctgggacttgagtcttggcccattccaggccagtagttgtgctgctctgcttggttacctctagccacggggagctccctctctggctgggcactgcgccacttttcacagggctctgggtggaaggcttggatgaattctcagtgggtggggcctttgcacacacccacccacccgcagttctgggggtcccaaagaccacttaggttcagtgattcactagaagtactcagagagcagaaaagctggttctcatggttatgatttaatacagcaaaaggacacagattaaactcagcaaaagaaagaggtgcacagggcagggtataggagggaccaggcgtgtcttccagttgtgctctcccagtagagttgccaggctggccctccttcctcccagttttgatgcgtgcctgcacacatgcagcattgccaaccagaggctctcacccaagctttggggtccagggtttttcttgggtgtcagtcctataggcatggagcaccctgtgactggccttagtgactccatcatccccaggcccctcagcaacccccagaggtcaaactgatactgcatggcccagggccctaccataaaccatgttagtgtcaactacctggtgtggttcaaagtcccaggtacacaaacaccttttttttttttttttttgagacagagtctcactctctcacccaggctggagcgcagtggcacaatcgtggctcactgcagcctcaacctccgggactcaggtgagcctcccacgttagcctcccaagtggctgggactgcgggcacgtgccacctatttttgttattttttgtagagatagggtctcgccatgttgcccaggctggaacagagacactgttatcaggcgggatattctaggggcttagactaccaggagccaggcaagagccagacctttctttgcacaaagtgaatcgctcactgcatgctcccaactcccctctgcctttcacagtccccggctgcctccccagcctccttggtggaaaggggtggctgtgtggacatcaggctctagccctgaagcagaggccaggccaagagagcacagcttggccctcccctggggctgcctcttaccaatcctgtgtctctgtcttttctctctcagccgcttccctctgtcactgttctgtttctgtctcttgacctctttccttatttctgtctctcaagcttatgggagcaagaggtggaataataaaaatgcaatgaattggctgggcgcggtggctcacgcctgtaaccccagcactttaggaggccgaggcgggcggatcacgaggtcaggagttcaagaccagcctggccaacatggtgaaaccctgtctctattaaaaatacaaaacattagccaggagtggtggcaggtgcctctaatcccagctactcgggaggctgaggcaggagaatcgcttgaacccaggaggcagaggttgcagtgagccgagattgcgccagtgcgctccagcctgggcaacagagcaaaactccgtctcaaaaaaaaaaaaaagtaatgaattacagtgttcacgcctgtaatcccaacactttgtgacactgaggagggaggatcacttgaggccaggggtttaagaccagcctgggcaacatagtgaaaccccatctctacaaaaaatacaaccaaacaaaactagccaggcattgtggtagctcatgcctgtagttgcagctactcaggaggctgagacgggaagatggcttgaacccagcagtttgagttacagtaagctgtgatggcatcactgcactccattctgggtgacagagttgagaccctgtctcttttagtttttgtttgtttgttttgagatggagtcttgctctgtcacccaggctggagtgcaatgccacaatcttggctcactgcgacctctccctcccgggttcaagtgattctcctgcctcagcctcctgagtagctgggattacaggcacccgccaccatgcctggctaatttttgcatttttagtagagacggggtttcaccatgttggccaggctggtcttgaactcctgacctcaggtgatccacctgcctcggcctcccaaagtgctgggattactggtgtgagtcaccacgcttggcctcctgtctcttaaaaaaaaaaaaaaattgaatcatttcaggaaaagattacaaaggaaagaaaaaggaacataggacaggtggaacaagtaaaagctagacagtaaagtggtagacgtaagcccagctatatcagtaattacactaaatgtaaatggacaaaatgctctagttagacagatttcctgactggatccacacaaacaaaaacagaagaatcacacccatctctccttggtgtccccacccccagcctcaggtttggtggtggtggtggtggtggtggtgttgttgtttaagtattttttagttttgtgtgtgtgtgtgtgtgtatttttagtagagatggtgtttcaccatgttgtccaggctgatctcgaactcctgacctcaagtgatccagccacttcagcctcccaaagtgctgggtgtacaggcataagccaccacgccagctagttttcttaactctaaaataagacagtgggtttctcaatggtttcttagtcagggtggtgccaccccctgctctggggggcatttgtcaatgtgtaggtagggccagttctggtggtacagggatgggggtggcactgctggcttccagggatggggctggctatgtcggtggtcctgtaccatagagagctgcccagaatgtcagtgtgagggaaacactgggccagtggcctcttcaggccgcagtctttccagcatgcatttgatgtagtcacttccttgtgcatgtccagaactctgagccagggaacccacttctttccacctgaccattgaggagccgccttatagtcccattttgcagatttgggaactgaggcccaggaggggcagagtggcttgtacataagcctatgccactgggaaatggcagaggcgggacccctcccccgccggcccacgttcactgcacatggcccccagggcttcactccgcatgattctctccccgacagagcgtcacggggttcggacgtcagatgatcgagaaaaccaagcagctggtggagtctaagtacacagtggagaatggctacagcaccagtgccaaggtcgggggctgcccaccgctgccctgagatgggcccagggcaggtggggggatggaagccgggccggacccccatgtccccgtgcctcctggtcacaccctgcccactctcctgttgcatccttgggtcccgttggcattagccacctgccaccccccgacaccagtagttgacagaagggaccctgcttctcacatacacacatccccaccgcccgcaggtggtgtatggtgacactgactccgtcatgtgccgattcggcgtgtcctcggtggctgaggcgatggccctggggcgggaggccgcggactgggtgtcaggtcacttcccgtcgcccatccggctggagtttgagaaggtgcgtggctgggtcaggggctctgcatttaggtgccctcatcagggtactcagggtgtcccgttctttgggttcacaaaagccacagtgtgaagggatgttgctgcttagattctcctgaggctggggccttggtttgggaagcctccaaggccttgggctttgttaccctggatggcatctgttctttgaaaaccctgtcgctgtccctggttttgaggtgtcacagtgtccctggttttgaggtttcccagtacctgtcagatgtggagctgccctccacgcagggaccctgatgggggtgcaccttagatctgtgcaccattgcccctggccctctgagtgcggcacacttggtcccaggaaaccttgcaccatattttcttttgaagagtctgggtctcgctctgtcgcccaggctggagtgcagtggcgagttcacagctcactgcagcctccaactcctgggctccggcgatcctcccgccttggcctcctgagccgccacgcccagttctcacactgtactgtttccccgtggcttaacgctctctcgtgccaggccttggacttggagcctcgcagagtggggaggtctctgcctcagggctcacccagccgtagtttctcctctctttcatgggatgcttcatcgactcgcctgtctggatctcatgttttagggactatctggatttatcccagtctctgtttcagattggggtctctggtgtgggggctctggcattgccgaggggcctcaggagccacttccagccatacagtgtctcggtccatcccaccaggctcagggcacggctcccatgtcctcaaactgcgtctgggaccctgtctaccttcagtttctggggggcgtctccagattggggcttggcctcctcaggctcagggtcttggccatggctccctcccaggtctacttcccatacctgcttatcagcaagaagcgctacgcgggcctgctcttctcctcccggcccgacgcccacgaccgcatggactgcaagggcctggaggccgtgcgcagggacaactgccccctcgtggccaacctggtcactgcctcactgcgccgcctgctcatcgaccggtgtgtggggcctcctccctcagactcagggggctgggccccaaacccctcctccctcagacccaggagtctaggccccagcccctcctccctcagacccacgggtccaggcccccagccccctcctcctcagatcccggggtcagggcccccagccccttcctctcttagatacaagagtccagacccccagcccctcctcctctgggaacacaggtgtcaggcccagctcttcctcggtggtgaagcagtggaaagagtcggcttgggcagctgtgggttcaggccctgcctctgccactctgcagcctatggtaggaagggcccctctctgccctgagcctcagccctaagagctcatcctggtctccagccctgagacccgtggaggcaccagcctggccctcagtgccttttggtgacgctgtgcggcccgctctcctacagagaccctgagggcgcggtggctcacgcacaggacgtcatctcggacctgctgtgcaaccgcatcgatatctcccagctggtcatcaccaaggagctgacccgcgcggcctccgactatgccggcaagcaggcccacgtggagctggccgagaggtcctgcgcggggcgggtggcctggccagaaataaccccctccttcctgccagctgggcccacttcctacaccctcgcccccacccccgccacccacctgccctcacccacccgccaccccatctccacgcaggatgaggaagcgggaccccgggagtgcgcccagcctgggcgaccgcgtcccctacgtgatcatcagtgccgccaagggtgtggccgcctacatgaagtcggaggtcaggcccacctggctgcctgctcccgcccagccccctcgctctcacttctgctttccgagatgggcgggcctgcgggaagggtggggcctcccgtgccctgtggggccctgagaaccgccccccatggcagcctgggtgtggcctcggccccctctggaggtcccccctctattctgacccctcccttgcttccctatggaaggggccccagtccctcccctgtgcatacagctccccagccgggggttcccttggattcataatcctccagctctacccccacccccagtgacccacatcttagccccatgacctctgacctcctgaccccttcctcatccttgcttccccttgtgaactctgacccttccgtggtgacctgagagccctacagactctgtggcccagagactccgtgacctccgaccccatcccagacccaggccccccccatgtcacagcccgcaggcaggcctaggccctaagccccaggccccatgaccaccccgtgtccaccccggtgccctttccctggctgcccgggtgtgactgccatgtggccgcaggacccgctgttcgtgctggagcacagcctgcccattgacacgcagtactacctggagcagcagctggccaagcccctcctgcgcatcttcgagcccatcctgggcgagggccgtgccgaggctgtgctactgcgtacgggggcaccaggggactgggggcaccctgggggggcagaggagatcaccggcccaccacctgcctcctctcctgcagggggggaccacacgcgctgcaagacggtgctcacgggcaaggtgggcggcctcctggccttcgccaaacgccgcaactgctgcattggctgccgcacagtgctcagccaccagggtgagcggccctggccactgggcccccactggccctcaacctgctctgccgtcaccccagatcctagacacccaccccatcggctggcactgccacccagtgggcccagggcccctgggtgggtggcccctgtctccaccccccacagagggtcctcggcccccaccccgggagttccccaggggagttttcccagcacacttgctccgttgttctccagcctctggggactttcagaagctgggattggcagtgggcagggatggggtggcccagttcctggctgggccccagcacttgggctgacccgcctccccacaggagccgtgtgtgagttctgccagccccgggagtctgagctgtatcagaaggaggtgagagggccgggaggtgaggaggggccaggtggggaggcgggggcgccctgctcagccgctgccgtccccaggtatcccatctgaatgccctggaggagcgcttctcgcgcctctggacgcagtgccagcgctgccagggcagcctgcacgaggacgtcatctgcaccaggtgtgtgccatgtcccgaccctgggctgccccgccccttcccagctcccaggcctgtgggttgtggacccaacctctgactccaaggcctctcctgagcatcctccccgcccatccccttccagctgtgagctgtcctgagcctcagtgtccttgtctgaaaaatgggcccatcccagccccccagagggggtgggtgcttagggaggcagcgcccggcacccagtgttgcccgggaaacggctgtcctcccgacacacccagccagcctggccccctccccagggcggggccgggctttccccagggaacgggtaggcggggtgggttcccacgccaggtgacaggtgatatacggccagccatggccctgcacctcgccaggcacccgctgttatcggctccccccccccaccccccccgtgcctgctgagcaaacagcccgctgcgggagggggcgggtgggctgggcagcaggcggggaccaaagtcctgggaacagcccccacccctctcccaggctgggcactgggccttggctggtcctgaccctgcccctgcccccacccgcagccgggactgccccatcttctacatgcgcaagaaggtgcggaaggacctggaagaccaggagcagctcctgcggcgcttcggaccccctggacctgaggcctggtgaccttgcaagcatcccatggggcgggggcgggaccagggagaattaataaagttctggacttttgctatatggtgctttgtggtctctgggggacactgtctggtttcataagccctggccttggctgggaccctcctgaggcccgcaccgcccctcatcctcagcaaaagcccccggactcccacctgtgctgcctggttcatgtgggccaagcctgcctcagtttcctctctggccctgaaggaacccttataccagcgcttctctgccctgcttagggcccccaggtgtctggccccggcccagccctccctggtgatgaccctggggaccctggtggctgccccgccctccaggtgctgacctgtttcctccaggccctggggcagccccaggcgcaccggggcttccactcctcagcccggccaaggggacccccccatcccccgccggaccacacacccacgatgtttccacgtcggggtcctggcaatgggctttgggtctgggtttccccccagcgactcccatctctatccccgcagcctctaactgccgtcagatgccctcggccctcccgtcacctcacacatcccccggggagagtcttgtgcttgcccctcggcccccagcccgcccctgctggaattcggctcctgggtccagatcctccgtttcctgattctcctcttcagtgaaccccagcccttcctcgatgttttcagggttcccccaaatccagctcctgtcccatctccagccctcaaggtcagccccccaaacccagccccacggggatccccaaatccagacagcccctggcccgccatccctgccatgtgacaaaggggttgtgcaatccagccccctcccctgaccccctccctgaggggatttttgaggagggccgagcttgtggccagcgggcaccctcctccccccggcaggggctgggccaagatataaatagggttggcggctgcagcgggcggcaaacagcccgcccggcaccaccatgctcgccctggaggctgcacagtaagtgagggcccccaaacctgcacccggggtccccacctgcactgcccctctgtggggcctcacccatgggcagtggtttctctgctcctcacggccggtgggtgggagtggaggggaggggtccaccctgtctcttgccccttctggttctgttccctcttcacttcggactctccatccccccagttcctatctttcctggtccccaaagatctcatttccccagaacacttgctagcgtgccctcctgcgggcgtcctccgtggctctcactctgtccatcctcctgtctccccgagttcccgtatctgttcgctctgtatctggcatctcccagctctcaacattctgcctgttgctctctgtctctctgcctgtctctgtgtctctgtctccagttctcgctctccctgccttttggtctccttctgcctcaccctcactctcagtgcctccatctggggctccaggaatcctccccgcctctgtgcgtgaatgtccctttgcacacctttctctgtgtcccacctctccttgagcctcctcatctgagtcttctccgggcttccccctctctacccagacatctctccatccttctcctctggtccaagctggactcaactgactcgccaccaaggccgcacttgacccaggccccctctccatccccacacctcctttccgggactttctctccctcactttccctgcccctccccaccagggtgtctatgcaaattctggggaggagggggacatttgcctcccccccaccccccacttcctgtcccagcagggggtagtgggggagtccggtgaatgtggtggggctggtccctcacacagggctgcggtggtcacagctgctgccgcctccccatcagcccccaaccactttgagattcaggtggctggaggcagcctcagcatgcccctgtgtctctccccctccaggctcgacgggccacacttcagctgtctggtgagttggggcccctgggggccagggaggggtggcccacagtgacctccctcagagaagtcatttgcttcctgcctcagtttcccctcccacctcttcctgtcactttgtttctgagctcccccttggtatctcctgctaccccgcatccgtatttttgatgtctctctccccctctcaggcttgaatccacttccttgtggctttgtatctctctctgcccatcccatattcagacaatgtattttcatgttcctttccttctttttgttcgtatttttaaaaattgtgttctctaacagttcagatacggaatactatacccaacacccttgaacccacaatccagtctgagtaatcaaatcttactgatgtggttgaaagaaagcccctgtttatgcccctccacattcacaccccagccatgttttttttgtttgtttttgtttgtttgttttttaattgaagtgtaactaacaagtcagtaaagtgacaaatcttgtgtttttgcattatctatacaccgtgtagccacaagccagatcaagataccgaacatttcaatctctgaaatattccttcctgtcccttctcagtcaatacctttctctgatattttccgccaccaatttgtaatttgttttgcctgctcttttttttgttttgctttttgagaaggagtctcgctctgtcacccaggctggagtgcagtggcagcgtcttggctcactgcaagctccacctcccgggttcaagcaattctcctgcctcagcctcccaagtagctgggattacaggcatgtgccaccatgcccagctaatttttgtatttttagtagaggcagggtttcaccatgttatccgggctggtttcaaactcctgagctcaagtgatcctcccacctcagcctcccaaattgctgggattacaggcgtgagccaccgcacccagctgcctgcttttgaactttatgtaaagtgagtcatacagcatgtcccttttggggtctggcttccctcactcaacatgaagtgtgtgtcagtgtttgtcctttttccttgctgtatagtactctatctatgatcagcccacaccacagtctgtttatcccttcttctgttgatgacacctgggctgtttccagttggagactcataataaagctgctgggatgattctggaacaaggctattttgtgcacatccattttcagttctcttgattaaatgccaaggagtgagactgccaggtcctaggcatggtgtggatctagctttagtttttcctagactcgagttcttgaagcaacaacacatgattcatggggcgaatcaacatatggagatttatttatttatttatttattgagacagagttttgctctgtcgccgggctggagtacagtggtgcgatctcggctcactgcaacctcagcctcctgggttcaagcgattctcctgcctcagcctcccaagtagctgggactacaggtgcgcaccaccatgcctggctaatttttgtatttttagtagagacggggtttcaccatgttggccaggctggtatcgatctcctgacctcatgatctgcctgccttggccttccaaagtgctgggattacaggcatgagccaccatgcccggcctatttatttttcgagacagagtctcactctgtcacccaggctggagtgcagtggcgcgatctcagctcactgcaacctccacctcccaggttcaagcgattctcctgcctcggcctccagagtagctgggattacagacatctgccaccaggcccagctaatttttgtattttcagtagagatggggtttccccatgttgtgcaggctggtctcgaactcctgacctcaggtgattcactggcctcagcctcccaaagtgctaggattacaggcgtgcgccaccacgcctagctaatttttgtatttttagtagagacgggatttcaccatgttggctagactggtcttgaactcctgacctcaggtgatctgcccgcctcggccccccaaagtgttgggatgacaggcgtgagccaccacgcctggcctggaggtgtatttaaaaagcattgacccctgcctctgttaagtgaaacacttccatttccccttgcccttcacctccggagcccccaggcaggcaaggctgggggagttcttccaccccttctccaggcgccctgattcgctgactgtgtgccagtgaggggccagggttcttgggagcccaccgtcttagcaggagctggctgctgtgtgcccctattgggttgtgtctctactctctgtatctctgtctctttgtccctgtctctgatgcctagtctctgtgtttctttgttgctctaatctctccagcatcccctcttctctcccatgtctgtgttggagtctccccaagggtccagggtgggggttgggagtccccaaggcctgggatgacccctcttccctcctgcaccccgtatcagtacccagatggcgtcttctatgacctggacagctgcaagcattccagctaccctgattcagagggggctcctggtgagtgaccccagccctgtgcccttcctgccttggggcccatttcacagataggggagctgaggcccaggggaggtcatttcctagcacaacaggataaaggtggcccgggcctatagccctcctcccctttcctctcctacccatccgctcctccatgcaaatcctggggtcagagatttgcacagcctacaatggcctctctgtgctgggggcttcgactgcgaggaggcctccgtgagacatcccagcttctgactcagtgcccttcccccagactccctgtgggactggactgtggccccacctgtcccagccaccccctatgaagccttcgacccggcagcagccgcttttagccacccccaggctgcccagctctgctacgaaccccccacctacagccctgcagggaacctcgaactggcccccagcctggaggccccggggcctggcctccctgcataccccacggagaacttcgctagccaggtgagtggtaaggggacagttaaaatcaagcccaaaccaggtgtggtggtgcacgcctgtaatcccagctgcttgagaggctgaggtgggaggaggattgcttgagcccagaaggtcgaggcaatccactgcactccagtctgggcaacagagcaagaccctgtctcaaaaaaaaaaaaaaaaaagaaaaagaaaagaaaactcaagctcagtcatttggttgaggtttgctgggtgccgggcactgcattgagactgcacatagtaagccctgcagcggcctcccaggttacgttccgttgttgcccctctgaacaagtgagtcaagagaggtagtgacaggaagccagggacagggcagactcgcattacctgtgttgggccggctttgaggaggtacctcaggtgtcccctggccacagcgtggtgatctgaacaaaggccaaaatctaggctgtcaacaaagagggagaccagagccaggagggccaccgccttggcctgagaggaggaagtggagggagacaaggggtccctggacatgcaggtgaccctgaccttccgcagaccctggttcccccggcatatgccccgtaccccagccctgtgctatcagaggaggaagacttaccgttggacagccctgccctggaggtctcggacagcgagtcggatgaggccctcgtggctggccccgaggggaagggatccgaggcaggtatgcgggagtggctggggtgggggagatgccagctggagatggtgggggggctgagagcaccatggcttcctgggcctctacatatactccagcactctgggcagctcccagatccgcaccacctgctggctgtgtgaccttgggtaagtgcctctacctctctgtgcccaggtttcctgtctgtgcgatggggatggaggtgatagtgtctaccctcctgaggtcgttggggggactaaatgggatagtaagtgtaaatgggacagcagtgccaggcacagagtgagcacttcaataagtcaacctcttcaccatcattcccgacaccacagcaacagaaatgataatgctatcaacccccaacggttcaacccttgccccctgcccgtgtgcccaacatcctttatgctcaaccccaagaaagctgagatcgttccttcctttctgtgtctgggcctcggtttctcgtctgtaaagtgggcatcactgtcatcctccccatctcacggggttatgatggagattcaatgagctcataactgtaaagtgccttgtgaagcacctggcactacatgctccacggtgcattgtaaaaatcaacacacaggctgggtgtggtggctcacgcctgtaatcccagcactttgggaggctgaggcggtcagatcaactgaggtcaggagttcgagaccagcctggccaacatggcaaaaccccgtctctactaaaaacacaaaaattaggctgggcatggtggctcatgcctttaatcccagcactttgagaggctgaggaggatggatcacgaggtcaagagatcgagaccatcctggccaacatggtgaaacctcacatttactaaaaatacaaaaattagctaggcgtggtggtgtgcacctgtagtcccagctactcgggaggctgaggcagaagaatcgcttgaacccaggaggcagaggttgcagtaagccgagatcttgccactgcagtccagcctggcgacagagtaagactctgtcttaaaaaaaaagaaaaaagaaagaaaaaaaaattaatggggcatggtggtacatgcctgtaatcccagctactcaggaggctgaggcaggagagttgctggaacccaggaggcaaaggttgcagtgagctgagattgcaccactggactccagcctgggtgacagagcaagactccgtctcaaaaacaaacaaacaaaaccacagcctcatttaaaaaattttaattaattaattaatttattttttgagacagagtctcgctctgttacccaggctggagtgcagtggcacgatctcggcccactgcaacctccaccttctgggttcaagcaatcctcctgcctcagcctccgcagtagctgggatcacaggcacccacaccatacccagctattttttgtatttttagtagagatggggtttcaccatctggccaggctggtctcaaactcctgacctcaggtgatccgcccgtctcggcctcacaaagtgctgggattacaggcgtgagccactgtgcccagccacacagcctcatttgtggctgagagacttcagctcagagaggttaattaagtcacctattttaacttaggacatttaagatggagaggatctctccaatgactaggaaagacacaagatggaaataaagattttatttatttttattcatttatttgagacggtctccatctgtcacccaggctgaagcgcagtggcgcaatctcggctcactactgcctcaaactcctgggctcaatcgatcctcctgcctcagcctcctgagtagctaggaccacaggcgtacaccaccacacctgactaatttttaaaatttttgtagaggtgaggtctcgctatgttgcccaggctgaactcccaactcctgagcctatgtgctcctcccacctcagcctcccaaagtgctgaagttacaggcatgagccaccacacccagccagaaataaattattttatggcttataggtcctggggcatacatggcacgcctggaggccacacacaccaggtcagggagcgcaggcagggagggagagagagagggaccagtggactgacgcctttattgggtccaaggcgtcggccaaacaggtttcctgagggggttttaattggtgggttcaggccaggcacagtggctcatgcctataatcccagcactttgggaggctgaggctggtagatcacctaacgtcaggagttcaagaccagcctagccaacatggtgaaaccccgtctctactaaaaatacaaaaattagctgggcctggtggtgcacgcctgtaatcccagctacttgggaggctgaggcaggagaatcgcttgaatccaggaggcagagtttgcagtgagctgagatcatgccactgcactccagcctgggcaacagagcaagactccagctcaaaataaataaataaataaatacttggtgggttgaaagcaagcaggatcaagttccaggaggtcacgctgtgcctgagagggggtcactgaggcatctgcacagtccatgcagggccgtcaagtaggctgtccatggctctcccacagggaggtggtcaccaggagtcagttgcataagagagatatctgggtcagccacactgaggaactcggggagggagatgtagaactgccaaggaggacagccctgcttccagcatgagaatgtccaacttttatttagttttattttattttattttgagagggagtttcgctcttgttgcccaggctgagtgcaatgatatgatttcagctcactgcaacctctgcctcctgggctaaagtgattctcctgcctcagcctcccaagtagctgggattacaggcatgagccaagcacacccagctaatttttgtatttttagtagaaaccgggtttcatcatgttggccaggcttgtctcgaactcctgacctcaagtgatctgcccaccttggcctcccaaagtgctgggatcacaggcatggcccaccgcgcccagcctccaacttatactttcgatgaatgccgaggcagcctaaaattataagaattcaatccgggtgcagtggctcacacctgtaatcccagcattttgggaggccgaggtgggaggatcacctgaggccaggagttcaagaccagcctgggcaacatagtaagacaccatctctacaaaaaataaaacaattagctaggcatgatggtgcatacttgtagtcccagctactggggaggctggggcaggaggattgcttaggcccaggaggtcgaggctgcagtgagctgtgattgctcctctgcactccatcctgggtgacagaacgagaccctgccttgaaaaaaaagaaattaagatgtcactacgtcaccaccccaaggtcacactgctgtaaaatggcagagatgggattcttgtagccagtgccctgctttgaaactcccagttattggccgggcgcagtggctcatgcctgtaatcccagcactttgggaggtcgaggtgggcggatcacctgaggccaggagttcgagaccagcctggccaacatggcgaaaccccgtctctactaaaaatataaaaataagccgggcatggtggcagacgtctgtagtcccaggtactcgggaggctgaggcagcagaattgctcgaacccaggaggcagaggctgcagtaagccgagattgcgccattgcactccagcctgggccgcagagcaagaccccgtctcaaaaacaaactaaaccctaggagcccaggagtcaggtgccctggcctctcccgggaccctgtcccgctttgggctgagaggctgggagaccaggagctggagagatagccaggccaatgcaactgcctccagatctgttcgcctctccgttataatcctttaagcggcgctgtcaacccatttcacagattctttcatccactagctcaacaaatatggaatattacgtgctggccgcagggcggaaggcaggacagatgtaaatctcgaaaattaaagcacagaacgcggagggggcctggggctgacagcttcgggcagggggagtggcttgcccccccccccccccgtggtgaggggcgcagagccaggtgtatgtaacagccacttccctcaccccacttttcagatccaggagatggaggccggggtggaagtctcggaggagggtggatggggaaggcggggccttagggacccctcacctaacgcgtgcccccgaccccaccgcagggactcgcaagaagctgcgcctgtaccagttcctgctggggctactgacgcgcggggacatgcgtgagtgcgtgtggtgggtggagccaggcgccggcgtcttccagttctcctccaagcacaaggaactcctggcgcgccgctggggccagcagaaggggaaccgcaagcgcatgacctaccagaagctggcgcgcgccctccgaaactacgccaagaccggcgagatccgcaaggtcaagcgcaagctcacctaccagttcgacagcgcgctgctgcctgcagtccgccgggcctgagcacacccgaggctcccacctgcggagccgctgggggacctcacgtcccagccaggatccccctggaagaaaaagggcgtccccacactctaggtgataggacttacgcatccccaccttttggggtaaggggagtgctgccctgccataatccccaagcccagcccgggcctgtctgggattccccacttgtgcctggggtcctctgggatttctttgtcatgtacagactccctgggatcctcatgttttgggtgacaggacctatggaccactatactcggggaggcagggtagcagttcttccagaatcccaagagcttctctgggattttcttgtgatatctgattccccagtgaggcctgggacgtttttaagatcgctgtgtgtctgtaaaccctgaatctcatctggggtgggggccctgctggcaaccctgagccctgtccaaggttccctcttgtcagatctgagatttcctagttatgtctggggccctctgggagctgttatcatctcagatctcttcgcccatctatggctgtgttgtcacatctgtcccctcatttttgagatcccccaattctctggaactattctgctgcccctttttatgtgtctggagttccccaatcacatctagggctcctccaagatccttttgtcatgtctgaaatcactcttgagaggtctggggtggaggatggggagtcagtgaaatgtgtcatgtctgggccctgtcagggacacccttgttatatctgggatcctccaatcacatctgagacctcctaggctctccatctgatatgccctttcagggaccccacaaagactgagttctcatggggatcctacccttcctagtgccactccctatggccatgctgaagaccactctggccacgcgactgattttgggtgatcatggcagctccccacccatgtcatttctaaccagaagtctcaaggtcgtcacccccctgccccccaaccgaggccccggtcgctggtggtggtctctttagtgcactgtagcacttggtggtggaggtgtgagggatccacattaacagcaggccatcagctgggcaatggctcacacctgtaatcccagcactttgggaggcgaggcagggggaatggcttgaacccaggcattcaagaccagcctgggcaacataatgagacctcgtctctacaaaacataacaaaaacaattagccgagcgtgggggtgaacacctgtggtcccagctgctcaggaggctgaggtgggaggatctcttgagcccaggaagtaggaggctgtagtgagctgtaatcgtgccactgcactccagcctgggcgacagagtgagacaccgtcttaaaaacaaaaacaaggccgggcacggtggctcatgcctgttgtcccagcactttgggaggccgaggcaggcggatcacgaggtcgagagatcgagaccatcctggccaacatggtgaaaccctgtctctactaaaaatacagaaattagctgggcgtggtggcacgtgcctgtagtcccagctactcgggaggctgaggcaagagaatcgcttgaacgtgggaggcagaggttgcagtgagcctagattgtgccactgcactccagcctgggggacagagcgagactccgtctgaaaataaaaacaacaaaaacagcagaccattcaaaatagggagactttgcataatccagatttctgccttcacttaaaactttggacggtctggagagagtcggccagttttcggtggggggtggggagctggaacaggacagtagcctttcctaatgaggcatttgttctccaatctgccccagtcgctgccatccctggctatctcaccctagcagcttctcaagcctgttggctttagaccactgtataaacccagctggaactgaagcctgggtggactatggagccctggttgggacccccagggagtcaaaggctgcgggccaagaggccagaggtccttgagcctgggtgggcaggtggatctagggtgcatgacttgctgcttcccaaccttagtttgtcccttctgtgaaaaagggagagaaggaggaggaagatctcaaaaagactttccagcccagtgcggtggctcacgcctgtaatcccagcactttgggaggccgatgcaggtggatcacctgaggtaggagttcaagaccagcctgaccaacatagtgaagccccttctctactaaaaatacaaaattagctgggcgtggtggcatgtgcctgtactcccagctacttgggaggctgaggcaggagaatcgcttgaacctgggaggcggaggttgtagtgagctgagatcacaccactgcacaccagcctgggcgacaagagcgaaactccgtctcaaaaaaaaaaaactgttgcagccccgttgagcctttgacaccgcctgaaatccaccccactcccaggaggaggaggaggaaggaatgccaatgacctagagacacgagaagtccatgtggaggcacacagcagctgatggcagagcccaggctgggacctgcccttaagagaatgagtgggaagggggagggaggaagggcaggtaaaacgtcctccccagggccccctgcaacggggaaggtactttttacaaaagctatcattgtcaccctaaatgtggaataaaataagatgcatcgacgtagacaaacctcctgggaccttttgtcagggactgcaatcctgcccctccactgaggccgctggctctcagagacaccgtgacatcacgggtgatgatgagaggagttcaaagagagaattatatgctggcgcggtggctctgtaatcccaacactttggggggccaaggcaggaggatcgcttgagtacaggagtttgaaaccagcctgggcaagatagtgagatccccttcccacccgtctacaaaaaaaataaaaaattagcggggtgtggtggcgtatgcctgtaattccagctactccgaactactgaggtgggagggtcacttgagcacaggaagttgaggctgcagtgagccgtgatcgtgcccctgcactccagacacggcgagaccctgtctcaaaaacaaacaaacaaatcacaaagacaccatacagcaaaacctatctgaaccttaatgccgagaaataagaggcttgacgcgcaggcacagagggttccgtttatgtcttcctctattcctgccaactgaagttctccacctcctccccgcttccccttccgtctgggtgtctgtccccttccctctgaattgagccctcgggctggcagcgagggacgcgaggcttcaggtggccgcggcactgcaggcctgggcccctccccaacttagcggggctcgcgggagcgcagtggcagtctgcctggcaacccgtgacatcacatggaactgacgccggattggctggacgctccccggaggcggagaaatttccggctcgtagggggttttggaaaaggaggagggggaagatgaacaggaaaaaaaagcggagggacttgttttcctcacaccgggtccctcacgctgcgttactagccaggcagtcccccagccttaaccctaagtccccaacaccctttccctccttcctccccacaacacctggtgtccccaagccccgcccctccccaggccccgccccctcggctccccgccgcgtccagagccaccccattcagaaagtcacaggtccccctgccgggaagggcgccaacgtccgggcagccctccagggccttcccagcctcccacccgcccccaccggggacgcccaccccctacccgcgtccggtgcctgccgtgcccgctccgggaagagtcgcggggagcggtcccaggaggggcggcggccagtccggggtcccagatggccggggccccagctctttgggtttgcccacgcccggggcgcgaaactccggagtcccagagccgcggcgccctccccggaggcgcagggacctcctccccccgccgccgtcctgcctacgctaggaaaccggaccctccctcccggctccggtttcccgaaaactcctgacttgcagatgctaagaatggcttcctagaccctgtccctcccctccctgcttcatgccagagctctggcccgcagcccttacccccttgagaccctcagtctcttcctcttccttctcccgggacccaggcgtccaggcgctcgtcctttctagggaacccaagaatctgggaccccagttgcttctgctcccagactcaggggtccaagcacccagtcccctcctccctgagattctggagtccgagccccagccccctcctccctcagacccaggtgtccgagccccagcccctcctccctggggacctggctctcagccatctccctaggtccagctgttatttctcgccctttagaacatgcgggcggaatgtggggcggccctgtggtctgatgtctcccggagccttctgggagtctcaggactcattaaaaggctccccttaggggcccacctgtcctccctagggcctagcgggacgcggctgcggtcagaggagcaggaggaggtcccccgacatgcctgaggcaaaaccaggtggcgccaggaccccctccctgtgtggggatggggctcttcttttctggatggggatttgggacccctctgtttgtagggttgggagaaggaggaaccttcgctgtgtgaggaggaggctccctttgctgtgcgggatgggggttcccgcatcagtttagggtgagggtctcgactctgcatggggaagagggtcccttccctttgtgacaggagtttccttccttgtatgagatggggtgggtctcatatctgtgtggggtgagggatccccttcactcagcagggagggtgtttctttttctataagtgattgggggggcatctctggtggagatgggattctctggttgtaaattgggttccttttgcttgatggggatgggggtctgtgtgtgtagactgggtttttttgtttgtttttgttttttggtttttggttttttttttgagatggagtctcgctctgcccccggggctggactgcattggtgcgatctcggctcactacaacatccgcctcctgagttcaaacaattctcctgcctggggtagctgggattacaggcctgcgccaccatgcctggctatttttgtatttttaatagagacgggtttcgccatgttgaccaggctggtctcaaacccccaacctcaggtgatccacccgcctcagcctcccaaagtgctgggatgacaggcatgagccgccgagcccggccagactgggaggtctttgcatgtgactggattctccacatccggggatggcatcctctgggcagggtctgggccacttctctgagtgaagactcagagggagccaggtgcaggggctcacgcctgtcatcccagcactctgggataccgaggcaggaggattgcttgaggccaggagttcaagaccagcctgggcaacatggcgagaccttgtctctacaaaaaattaaaaatcagccaggtgtggtggtgcatgcctgtagtcccagatacttaggaggcagttgaggctgcagtgagctgtgatcacgtcactgcactccagcctgggtgacagagtgagaccccgtctctaaaaaacaagcaacagcaacaacaaaaatggcccagtgcggtggctcatacctgtagtcccagcaccttgggaggccaaggtgggtggatcacctgagcccagcagttcaaggccagcctggccaacatggcaaaaccccgtcactacaaaaaatactaaattagctgggcttgtgggggtgtgcctgtagtcccagctactcaggagtctgaggtgagaggatcacttgagcccaggagacggaggttgcagtgagcccaaatcttgccactgcactccagcctgggagacggagcgagaccctgctgggaaaaaacagaaacaaaaacaaaaaatagattccaagggaccttctctgtaggatatggggtgattgtgggtataaagattagtggttcccatctgcatggagtcacaggggaagtctctgtattaaggatgggggagcctcatttctgtgggcactgaggcttccccgtgtaggaattagcggggcttcttcatgcagggaatggggtcctttttgcggggtttggggaccttctttgaatggggaacactttctgtggagatgaggctttctctctatgaggaactcaccgcaggaatcatgcaccgctgggcggaccccctcctgggatgtctggtccgctggcatcaggccaagcaggctgtggggtgggtccagcccctactgtagctgcagacccagccggcaaggaacagcaggcagggcaggggaaggatgctgcggtcagcaccaggtgtccagtttccagcccagagggagagctaattataccctcggacccaaaaggtcagggcgtggtggcctgggcggatggggcagggcctgctgggggtaagggaaacccgatcccacagactctcagatctgagataaatttatacctagggtgggggcctggactcttgggtctgagggaggaggggctgggggcctggactcctgggtctgagggaggaggggctgggggcctggactcctgggtctgagggaggaggggctggggggtctggactcctgcgtctgagggaggggcatgggtgtgcagaccgcatgctcaactatgactgtcccctaccttacagcggccaaaaaggcccccaaaggcaaagatgcccccaaaggagcccccaaggaggctccccctaaggaggctcctgcagaggcccccaaaggtgaggaggtgctccctcgggctcaaccgacctggcttctcatctccatcctcctcgctacgcctctccaggcctttccccagcctctatccttgaatctgtccccgcacagccccagggctgacccacgcctcccgtgctcccagccctcccggggctccctggcacccgcaggcagagcccagcccctcggctggcatcggctccggtcagctggctgattgatcaccaggtccggccccggtctctctaaacctctcccgccccaaaggcacattcagtgccctccagtccacagatgaggaaaccgaggcccaaaggggtgagggagcctggccaaggtcacacagccacgagggtgacaggtggcctttcccaggtcaggaaaagccatttaacccccatgatgtttggtttctgagtagaggggccctcactgtctctaagtcctttccccaaagcggcccactgtcccctccccagcctatctcagacctcctcatcctaatcctgtcccctgaacagaagccccacccgaggaccagtccccgactgcagaggagcccaccggcgttttcctgaagaagccggactccgtctcagtggagactggtgaggggaacccgggggaggaggggctgcggcccggactcctgggtctgagggaggaggggccagggtctcgttctgtctccctctggagagccttatgttccttcctgggcctcctcccactctaccctgtcactcaccccatgtagggaaggacgcagtggtcgtggccaaggtgaacgggaaggagctcccagacaaaccgaccatcaagtggttcaaggggaagtggctggagctgggcagcaagagtggcgcccgcttctccttcaaggagtcccacaactccgccagcaatgtgaggaccccgtgggccagagggctggtggaggggagtggagcttgtgcaggacatgctcctcagaagccctgttgcctgaggcatcaatgtgggcctggagccgggatggagagtgggccctctgaggatggaggttgtgcggggctgctggggagaggttgtgtgaagcagagggaggatgcctggggttgggtggggatgcattagggcttggtcatgtacattcctggcaaggcctgagggggccagggacctgggccccagaagtcctgatgggtcagatatgaggagacagagctggccaccaggtgctgagacccctctcggtctccattggcccccctgtggggtgggggtgaggacgtggagatagagctatgagtggactctgaggaatatggggtggctctagagggtggtcccgtgcacccacacccccggccctggacccaggtgtacaccgtggagctgcacattgggaaggtggtactgggggaccgtgggtattaccgcctcgaggtcaaagccaaggacacctgtgacagctgtggcttcaacatcgatgtggagggtatgctggtgggggatgcgggagcaaagggttctatgtctgggtggggtggacagatgtaccagccaggtgttgggagagtgcacaggcatgggcatgaggtgggcacaggtttttggaggagggagtgcagattctggggtcagagtattcaaactcaaggagacatagcatgggaggaggtctggatttcgggggtgaaagtgtacagggtcttgggatgcacatgcaaaggcttaggaggtgagttatgcacattccacgtttaagaaagtaggcaaaacggcttgggaagtgagggtgtccaggtttagagaagaaggatgtaggggtttagagtgagggtgtacaggattaacaggaggttacacggatttgagggcacatatatgggcccctgagggtgtatgggctctgggggtctgcagcccagaatgtgtgagggcttaaatgtggggtgcacaggaaatgagattgtccaggcctggggagaaagacatggtggcccaggtgtggggggtataggctgctgagagagggtggagcttggcagctggggaaatgagtatgagctggtctagaactagaggatgcccaggcctgagcaaggttgtgctggtccaagagatggagaaaagggggcctggaagaggttgtgcaggcctggagaggggctctcagtctaagatcagccctggcctctaactcaccttcccttctctcatcacctctccccagcaccccgtcaggatgcctctgggcagagtctagaaagcttcaagcgtacgtaagtgaccccaggcccttaccagggtcccaaggaccatgggaggctctcccttggaaggggaaaaagggaggattggggaaggcaaggggtgaatctgaagggtcaagactcacatgccctctcaatggccacaggagtgaaaagaagtcggatactgcaggtgagctggatttcagtggcctgttgaagaagaggtgagccccggacttggcacagagaggggagatgggactcaaggggaggaggtggtgggtgaagctccatggcccactgattcctcctggacccactgcttatccctctaccacctccatctgttcactccctgcccacccagcatctaacacaccaacccatcaggctgcctgttcatccacccacctacccatttacccagacccctacccacaaccccacccagccaaacatctgccatgagttcacccaccttctcaccccttaacccaccattctcacacccactctgctgttcactcaggctctagttcacctatgcctccacctactcaccctcccatccatccatccctccatccctccactttccacccactgatccattcactcacccatccatccaaccagtggcctatttatgtatctactaatacatctatccacctacctgcccagttgccaatctatctacccacatatccatccgttaaccaccattttcccacctgtttacctgcccatctgccattacagtcagcctagctacatgggtaggtggatggataacgggtgaatgggatgttggatttggttgggagatgcaggtgcagatagacaggtgggaaggtgggtggatggtacggatgaatgcatggtggagaggtgggaggatgggtgcctcagtaggtggggaagcggatggatggatggggtgggtggacgatgaatggatgggttcatgaataggtggctgagttcaccagtgaagaggtgggcagttgacacgcccatccacacagatagccctctgttagattgaactatgtaaaattgatgttctgcaggtaaaaaatgattgaagtctgggtgcagtggttcacgcctataatcccagcacttttggagaccagtgtgggaagatcacatgagcccaggagtgtaagaccagcctgggccacatagggagaccctgactctacaaaaaaaagaaaaattagcagggcatggtggcatgtgtctgtggtcctaactacttaggaggctgagggaggaggatcgtttgagcccaggagatcaaggctgcagtgagccatgatcgcgccactgcactccagtctgggcaacagagtgagactgtttcaaaaacaacaaccacaaaaaattaaatatcggcaatctcatatgcattatctgctggcccacttatccatcttcacttgcccatcaatccccataactatatccctgacaattccatttactgatcaattctgtctgcagccagccagccacttccttggccacttctcatcaacatattcacccaactgcgcagtcatttctcaccaacccatcaatccatccactcacccacctgtcttcccccaacccatcaatccatccacccacccacctgtcttcccccaacccatcaatccatccacccacccacctgtcttcccccaacccatcaatccatccacccacccacctgtcttcccccaacccatcaatccatccactcacccgtcttcccccaacccatcaatccatccacccacccacctgtcttcccccaactcatctgcctctcttcccacccacccttccactgacccacccacctacttatcagcccacttactcaccattctgtacatcaattcaaatattcatgtccccacattcacctccacatctatcctctctttgttcctttcccttccttccttccctcccaagctccatccatgcattcactcactctctcacccatcaaccatcttctgaggcctcccgtctactaggtcctgggctgagatccatgcattcactcactctctcacccatcaaccatcttctgaggcctcccgtctactaggtcctgggctgagatccatgcattcactcactctctcacccatcaaccatcttctgaggcctcccgtctactaggtcctgggctgagatccagggagagagaacagtctgactgggtccctgatgtgagatcactcattgccttgggaaatgggtcttgtccaacagacatagatacagactgagactatttggtgtgattttagagagggtcccaccggggcctgtgagagcccagagcacgagcaactcactgtcttgtaggacacggaatgcctcagggagaagggaactttggtgctaggtcttgtaggatgaagaggagtctgggaggaagagaaggtagggagaggtcatgaaggtagggaaacattttgtgcaaaggctgggaagcaggagagagcctgaagtgttcagcaaaagtcaagcagcttggttcaggtgactttggggggagtgacggaagtagctggggtgtgatggccaggcggagggctggggcttcctcctgagggcagtggggagccacagaagagttctgaacatgaaagggagaaccactgatgtgggtgtcagaaataccccacaggataaaagaggacaaatagggtgcaatgtatgctgcttgggtgatgggtgtaccaaaatctcacaaatcactaccaaacagcttactcatgtaaccaaacaccacctgtttcccaataacctgtggaaataaaataaataaataaataaataaataaataaataaataaatgaaaagaaatactctgcggaccaggcatggtggctcacacctgtaatcccagcactttgggaggctgaggcgggtggatcacttaaggtcaggaattcgagaccagcctgtccaacatggcaaaaccctgtttctactaaaatacaaaaattagccaggggtggtggcgtgagcctgtagtcccagctactcgggaggctgaggcagaagaatcgcctgaacccaggaggtggaggttgtagtgagccgagatcacgccactgcactccagcctgggagacagagtgagaatctgtctcaaaaaaaaaaaaaaccaaaaaacccagtggggactgtgctgggaagaggtcagaagaccccaggaggaggctggggcaatggaccaggcgggaaacaataagacccctaaagggaaggtggcttgggtgagtcacagagccaatgagtgaagaaggcagagggacatcctcccttcctcactccctgatggcccctgtccgttcccccacccgccagggaggtggtggaggaggagaagaagaagaaaaagaaagatgacgatgacctaggcatccccccggagatttgggagctcctgaaaggggcaaagaagagcgagtacgagaaaatcgccttccagtatggcatcaccgacctccggggcatgctgaagcggctgaaaaaggctaaggtcgaggtcaagaagagtgcaggtcagccctggtctggggggagctgggccctgcacacaagggacccctagccttgtgggtgtctaatgattggaccctggacctatcttttcgaggtcccaatgaggtaggaggcaagacccaactctagcggtgggcctcggacaccagaccaaattgaggactagctaaaacagggacagggtggaagcagctttccataagacatgcccaccagtgtgccatgtcagtttaccatggccatggcaacagccaggagttactgcccctttccatggcaatgaccagaccacccaaaagttaccacccttttcctagcaatttctgtataacctgctccttaatctctaggtaattaaaagtgggtatcaatctgactgcagatctgccctgagccgttgctctctgtctctggggtagccctgttccgcaggagcagtcagagggctgtaacactgccacctcaataaagctgttttcaggctgggtgcagtggctcacgcctgtaatctcagcactttgggaggctgaggtgcgcagatcacctgacgtcaggagttcgagaccagcctggctaacatggtgaaaccccatctctactaaaaatacaaaagtcagccgggcatggtggtgtgcacctgtaatcccagcaacttgggaggctgaggcaggagaatcgcttaagccagggaggcagaggttgtggtgagctgagattacgctgtggcactccagcctggggaacagagtgagactctgtctcaaaaaaataaaataaaataaaaaataaaataaaataaaataaaataaaataaataaataaaaataaagctgttttcttctacctaacactggcttgcccttgacttctttcctgggtgaagccgataacccttgcaggctaagccccactttggggtcccctgccctgcatcaccaccagagaagttctcaaggatctctaagttcataggaggccccctgacttcctcactttgaccttggagagcccagggcctggggagggagatgtggtgcctctggggatgaccaggggaatgaggaccacacgcctccatcccctttgcatgcctcaatcttcagcattcacaaagaagctggatccagcctaccaagtggacagaggcaacaagatcaagttgatggtagagatcagcgacccagacctgaccctcaagtggttcaagaacggccaggagatcaaaccaagcagcaagtatgtgtggggtgggcagtccctgcaccggggagatccccgtccagagagaacgcccggagacaaggcctatcactcttaaccagaaagggcatattcacccctatatgaagagtacaggccgggcacagtggctcacgcctgtaatcctagcactttgggaggccgaggcgggtggatcacctaaggtcaggggttcgagaccagcctggctaacatggtgaaaccccatttctactaaaaatacaaaaaattagccgggtgtggtggcacatgtctgtagtgcctgtaatcccagctacttgggaggctgaggcaggaggatcgcttgaacccaggaggcaagaggttgcggttgcggtgagctgagatctcgccactgcactccagcctgggcgacagagtgagaccctgttaacaacaacaacaacaaacacatcacaagacaaccttttttaaattaattacctaattttgttttgagacagagtttcgctcttgttgcccaggctggagtgcaatggcatgatctcagttcactgcaacctctgcctcccaggttcaagagattctcctgcctcagcctcccaagtagctgggatgacaggagcgccccaacacatctaatttttggggtgtatttttggtagagatggggttttaccatgttgcccaggctggtcttgacctcttcaagcaatctgcctgcctcagactccaaaaatgctaggattacaggtgtgactggccctgccatggttatttaaataataggaattgctagcttggacaacatagcgagatcccatctctacaaaaaaattaaaaaattagaagataccaagaaaagagaaaaaaaaattagctgggtatggtggtgtgcacctgtgatcctagctactcaggggctgaggtgggaggatggcttggacccaggaagtctaggttgcagtgagctgtgatcgcaccactgcactctagcctgggtgacagagtgagaccctgtctcaaaagtaaataaaaataaataaataattgaaactgggccctcaatccctttccacacaatttggctctgagagagagagagagagacttgccttgagaacaggtaagcagagctaccccagggataggtggatgctccacgccctggtttgaggtgagacttttgaatcaggtacgtgtttgagaacgttggtaagaagcgaattcttaccatcaacaagtgcacgctggcggatgacgctgcctatgaagtagctgtcaaggatgagaagtgtttcaccgagctcttcgtcaaaggtgaggctggaattcagaactgagcctggagagggactggaactctggagggggtcctgaaacgactgacctcctgtccccctgccccacagaacctccagtcctaattgtcacacctcttgaggaccagcaggtgtttgtgggtgaccgggtggaaatggcagtggaggtgtcagaagagggtgcccaggtgatgtggtaagtgacccttgatccctgatctccatacaggtgcacatagtttctttgcctctgccttgatctttatgggacctcctgtgacttctcttggagatttctgacctttactcagtagtcatccccaggagatctcagcttttctctataaatccttaccttcacctaaaattgtttctagaatttctgacctctacctatcctatcctcttcagggtcgtcttcctgatctccgactgttccattaaatattcattcatctgaccaattatctattccttggtccatctatccaggtatccactcatccacccagtccatccatccatccatccatccatccatccatccatccatccatccatctgcttaaccatccatccactcatgcatccatccatccactcatccatccatccatccatccatccacttaaccatccatccatctacttaaccatctgtccatccattcatccatccatccatccatccatccatccatccatccatccatccatcccattgacccattcatccatctactcattcatatatccactcttccatttaggttgccatctagccatccatcgacctatcaatccagagatctatccatccactcactcactcacctgcatacttgcccaccatctacctatccattcatccatctatgtacctattcaccaacccaacaaatatttatcgagcacctgttgtgtggtgtactcttctacgtatcagagatataatggggagaaaaaaaatgtcaacatggccgggcgcggtggctcacgcctgtaatcctagcactttgggaggccgagacgggcggatcacgaggtcaggagatcgagaccatcttggctaacacggtgaaaccccgtttctactaaaaatacaaaaaattagccgggcgtgttggcgggcgcctgtagtcccagctacttgggaggctgaggcaggagaatggcatgaacctgggaggcggagcttgcagtgagccgagatcgcgccactgcactccaacctgggagacacagcgagactccgtctcaaaaaaaaaaaaaaaaaaaaaaaaatgtcaacatggtacctgccttcatggcatttataatctgctaatttggtgatagtggtggtggtggtgtgtgtgtatgtgtgtttgtgtaggagaaagagataggcattagtcaagtcatcacatacatacatataaaagttccattttgagactggcttgaaaggagcagtaatggatgttgtaatagcttcctaggaggaagggactcaggaggtcagggaagtcttcctggaggagatgacaattgagctgagatctgaatgacatggaggtataagtgaagagagaaggggagagtgccctggacagggaaaaccactgacagaggccacaacgtttgatgtttctctgagaccccagggcttcctctgtgcggacctctccccatgacatctttttgtgtcccctgacttccagccaataccttggtaccttgagacaattaactgtgtgtggcctgtgacttcctcctctctctcctcactgccttttttttttttttttgagacagagtctcactctgtcacccaggctggagtgcaattgcgtgatcttggctcacctcaacctctgcctcccggattcaagcaattctcctgccttagcctcctgaatagctgggattataggtgcccaccaccacacctgcctaattttttattttttattagaggtgggttttcaccatgttggccaggttggtctcgaactcctgacctcaggtgatccacacacctcagcctcccaaagggctgggattacaggcatgagccagcgtgcctggccctctctctccccttcacctgacctgtgacccgtccaccactcaagatgcctctgccactcattatgtctcctccctccggggacctgccttctgatccctctgcatgggcccccgactgactctccaagacccagaccgagagctgtgctgtctcctcacatcccgttctgtgtctcacccacctaggatgaaagatggtgtggaactgactcgggaggattccttcaaggcccggtaccgcttcaagaaggacgggaagcgccacatcctcatcttctcagacgtggtccaggaggacaggggtcgctatcaggtcataaccaatggcggccagtgtgaggccgagctgattgtggaaggtatggggcctccaggtagggcacgggctgcactgcgcatgcttctccacacagcttgaggttgctcaggccccccagtctggaagttgttcctgactcctctctttcccacacaccctatgttcagcccaccagggagatctgatggctccagcttcaaagtaaattttggatccagccaagcgtggtggctcacgcctgtaatcccagcactttgggaggccgaggcgggtggatcacttgagcttaggagttcgagaccagcctggccaacatggtgaaaccccatctctactaaaaatacaaaaaaattagctgggcattgcggcgtgcacctgtagtcccagctactcaggaggctgaggcaggagaattgcttgaacccaggaggcggaggttgcaatgagctgagattgctccactgcactccagcctgggcaacagagcaagactctgtcttaaaacaaaaacaaaaacaaaaacaaacctgggcgcggtggctcacacctgtaatcccagcactttgagagaccaaggtgggcggatcacttgaggtcgggagttcgagaccagcctggccaacatggcgaaaacccatctctactaagaatacaaaaattagctgggtgtggtggcgtgcacctgtaatcacagctactcgggaggctgaggcaggagaatcgcttgaacccaggaggtggaggttgtggtgagccgagattgcacactgcactccagcctgggcaacagagtaagactctgtctcaaaaaaaaaaaaaaaaaaattagccgagcatggtggcacacacctgtaatcccagccactcaggagtctgaggcaggcgaattgctagaatccaggaggcagaggttgcagtgagccgagattgtgccactgtgctccagcctgggtgacagagcaagactccgtcttaaaaaaaaaaaaaaaaaaatctgaaaccaaccacagcccccctgttgctgcccccgcctggcccaggccttccttccctcatgcctggactggtgcagttgtctcctctctggtcactctgtgtctatacctgccccttgacctccaccccccagtacccgccagagtgagcctcgtaaaacataagtgagatggtgaaaagaaacaggtctgtggtctgagtaacagtactgggtccatgtcagtgtcctggtttggatactggactccattatgtacgatgtcaccagtgggggaggctggatgaagagcacacgggactctatgtgctatttttgcaagctctaggggtctataattctgtaaatataaaaagtaaaaaacaacgaactcaagtcagttatgggtcaaacaaatgatggtatttccatatctagccataaaaaaagagaatgttttagactgggcatggtggctcagccctgccattccaactctttgtgaggccgaggtgggagggtaaattgagtccagaagttcaaggccggcctaggcaacatggcaagaccccgtctgtataaaaacatcaggccgggcttagtggctcactcctgtaatcccagcacttcgggaggccaaagcgggtggatcacctgaggtcaggagttcaagaccagcctggtcaacatggtgaaaccccatctctactaaaaatacaaaattagccaggcgtggtggtgcatgctagtaatcccagctacttgggaggctgaggcaggagtatcacttgtacccggggggtggagttttcagtgagccaaaatcacgccattgcagtccagcctgggcgacaagagtgaaactccatctcaaaaaaaaataaataaataaaataaaataaataaaatccccaaagtgctgggattacaggcgtgaaccactgtgcccggccacctcagggcctttgcacacgctggtccctctacctgggaggctttttttcatcttctggtagattcctccctgcctccctcaggcctcctcgctccctcctctgtttctttcttcactgtctcccactagcatgggagcttcccgaggccaacgggttgtttctgggttgtctgtggctggtatccccagtgcctagaccagcgcctggcacacagtgggtgctcacaagtgtctgtgcactgactagagtagtgacggctccttgtctttctctccctgaccagagaaacagctggaggtcctgcaggacatcgcggatctgacggtgaaggcctcagaacaagctgtgttcaagtgcgaggtgtctgatgagaaagtgacgggcaagtggtataagaatggggtcgaggtgcggcccagcaagaggatcaccatttcccatgtaggcaggtgaggagtgggctgcagaagtggctgggggtagggtgtgcatagcagttagctttagctgtgtaacaagctgtcccccatttatttttttttttgagatggagttttgctcttgttgcccaggctagagtgcaatggcgcgatctcagctcactgcaacctccgcctcccggattcaagcgattctcctgcctcagcctcccaagtagctgggatgcaccaccacgcctgactaatttttttgtatttagtaaagacagggttttgccatgttagtcaggctggtcttgaactcctgacctcaagtgatccacctgcctcagcctcccaaagtgctgggattacaggtatgagccaccacgcctggactttttcttttctttttccttttttttttttttttgagtcagagcctcacactgcaacctccaactctgaggttcaagcgattctcctgcctcagcctcctgactagctgggactacaggcatgcgccaccatgctaatttttgcatttttagtcaagacagagtttcaccatgttggccaggctggtctctaactcctgacctcagctgatccacccacctcggcctcccaaagtgctgggattacaggtgtgaaccaccgcacctgtcctgtccccaaacttagaggtttaaaaggatgaggattgggctcggagcagtgactcatacctgtaatcttggcactttgggaggccaaggcaggaggatttcttgggcccaggagttcaagaccagcctgggcaacatagtgagacactctctctaaataaataaataaataaattaggattcatttcatcttgagcgtgcaggttggttgggggctggctgatccaggatggcctcgttcttacctctgtggtggcaggacctggaccctgctgactttgcgtgggcactgtcaggacctcagctgggacagctgggcgcccagcacgccgctccctatggcacctcctcctcctccagtgagctcagcctagcacactcacgtggcagaggcagaggtcctgagagagcatggaagcaaatgagacttctgtggcccaggctggaaactggcccaatgccacttccgccatagtctgttgggcaaggaaagtcccaggccagctctgagtcaagggctgggaagcagattccaccactgatggggatgctgcaaagtcgcatttcaagggcatggacaccggcagggaaaagcctctggccatatcagctaacagtcaacatgggctccagctcagaaaacaagaagctgggattcaacaggtggcacgtggacacctaagacaaacacctggttatctgcagaatgcagagagccagcatgatgcctggagaacatcgtgccgttcagggcttcctggcaatagttcttggtgggatgtaggttttccctgtgttctgtgtagggaaccatgccggctggtggtctcagtaatgatgataatggccgggcatggtggctcacacctataatcctagcactttgggaggctgaggtgggtggatcacttgaggtcaggagttcgagaccagcctggccaacatggtgaaacccccatctctacaaaaaatacaaaaattagctgggtgttgtgttacacgcccatagtcccagctactcgggaggctggggtgggaaaatcatttgaacccaggagggggaggttgcagtgagccaagatcatgccattgcactccagcctaggtgacagagtgagactccatctcaaacaaacaaacaaaaacaacaacacataatgatgataacacatcctgacacttacagggcccttactatgtgccaggtacttttctaggtgtggtttttttcttttcttttctttttttgagacagggtctcaacctgtcacacagcctggagtgcagtggtgcaatcatagctcactgcagccttgacctgggctggagcaattctcccacctcagcctccccaagtgctgagattacaggcgtgagccaccatgcccggccaaagaacagtatctatttatttattttctgtagagacagggtcttgccgtgttgccctggctggtctcgaactcctgggctcaaacaattctcgatcctcagcttcccaaagtgctgggattacagatgtgagccactgcacctttctcgatgctttacaacaaccttgatgtagatggatatcattacccctattttatagatgaagaaacagaggcacagagaggttaagtaacttgcccaaggtcacatagctaccgatttgaaaatagaccacagcgttccaaagccctggataagaatgcaggcatgtggactgcactgagggaagctgattgaggcggtgcagccccatagtggtcccattgcaatctggttcgagccctaccctgctcccccaccccttaggttccacaagctggtgatcgatgacgtccgccccgaggatgagggagactacacgtttgtgcctgacggctacgccctgtcgctctcggccaagctcaacttcctgggtgaggatgccccttcctccttccctgggggctgtaggatccaccctcgcagacccagggcccgggatgtccctctccaggattaaggttccccgagtgcgaatgaggacgacagcaagcgtctgtcccgctcatggctggagtcagaagatggagggagagcgctgaactcgctgccacctgccgcccgggaggaggggtggctcctgggcctgaacctgtctccagcaccccagttcccagggagactgccagaccctgtcacctcttcctctgggctgtgaaggtggggtgaggggcctgctgagtttagacctaactgtccagtcttctttgtcttgcagaaatcaaggtggagtacgttcccaagcaaggtgagcaccacgggctgcgctgggagcgggtctgagggaggagggaccgggctgagggaggaggggaatggccgagggaggataggcagggcgaggaaggatgggcggggtgcgggaggatgagtggggagaggaaggagggggttggggtgctgaggaagggagggaggaggggcggggagctgacagacggggtgggggctatcggccgagaggagggactgaggtcctgagggaagagggattggggacctggatccctgggtctgagggaggaggggctgggggcctagactgtagggtgtgagggaggaggggttggggacctggatccctgggtatgagggaggaggggctgggggcctagactgtagggtctgagggaggaggggttgggggcctggactactgggtctgagggaggagggcttcaggacatggatccctgtgtctctgtcactgttggaacccaactttttggagattctcttgtgggaactgggaaggcccagcctcccactcccagggtccctgtatctcttctgtgccaccagagccaccaaagatccacttggattgctcggggaagacctcagagaatgcgattgtggttgtggctggaaacaagctgaggcttgacgtgtccatcacaggggagccccctcccgtcgctacctggctgaagggagatgaggtgggttggggccgcccctctgtcctcactccctttccgtttaggcaagtctctttccccctgagcctgagtttcatcctctataaaatgagggtgatggttccttcttcacagggttgttttgaagattagagattatgtttgtccatcacaggtatgggcctagcacatggtggatgctccatccattcatccattcacctttcagttaattaatcaagtgatcgaccagtttaggcttccagccagccagtaactcatccgcccatccagctgatgattttttcatcaactaattggttaattcacccagccatccactcgtccagtaattaatctgtttgtccatttatccatcaaccaatttagttatccattcatccagaaacacatcatttacccacttcaatctatctatataatctatctaatctatctatctgtctatctatctatgtatctgtgtatgtatgtatgtatgtatgtatgtatgtatgtatgtatgtatctatctatctatctatctatctatctatgtatctatctatctatctatgtatctatatttttgaaaggtggaatctcactctgtcacccaggctggagtgcagtggcgtagtcttggctcacggaaacctccacctcccaggctcaagtgatcctcccacctcagcctcttgagtagctgggaccacaaaagtgtgccaccatgcctcgctaattttttgtatttttgtagggacagggtttcaccatgttgcccgggctgggctcaaactcctgaactcaaacgatccttccaccttggcctcccaaagtgttgggattatgggcatgagccaacatgcccagccatatctatatattcctctatccatccgtccaacaaatattttaaccttgcatgtcccaggccctgggacagctcgatttttcatttcttctctgtgcttccatttcctcttctgtaaaatggacagacttgctcaacatccatccatttgctcactcagcgtacatcccctaaagttttctccgcaccaggcactgaggatgcaaccatgagttggatgcggctcctgccctccaagagccttcattttacttaaaatttatttatttatttttaaatttgagacagggtttcactatgttgcccatgctggtcttgaactcctgggcttgggtggcactcctgcatcagcctcccaaagtgctgggattacgggcatgagctacctcaccctgctcagtagcctttactcttgcggagacgcaaacacctgcccaagaagccacagtccagggtgctctggctgagataaagggaggttctagaagctatgagaacccaggggctggagccagcacttccagctaagggtatccaggaaggcttcctggaagaggtgtcttctgggtgcttcctgaaggatgaggaagagcttagtgttgcatgcacagggaccagccttgcaaaatctctgggacaaggcagtcttttttttgttgttgttgttgtttggttggtttctttttttctcttttttttttgagatggagttttgctcttgttgcccaggctggagtgcagtggtgttatcttggctcaccacaacctccgcctcctgggttcaagcgattcttctgcctcagcctcctgagtagctgggattacaggcatgcaccaccaggcccggctaattttgtatttttagtagagatggggtttcaccatgttggccaggctggtcgcaaactcccaacctcagttgatctacccgcctcggcctcccaaagtgctgggattacaggtgtgagccactgcgccccgtccagtctggtgcttttaatgaaggacggcatttggagggcgaggagggcagtggagcgagtgaggactctgtgtgttgatggggaatcatgggaggattctgagcaggggaatggcagaggcaggcctgggtttgcttggggacacgatggggtgcaaggccatctggtggctgcgttcaggtattcacgaccaccgagggcaggacccgcatcgagaagcgggtggactgcagcagctttgtgattgagagtgcgcagcgggaagacgagggccgctacaccatcaaggtcaccaaccccgtcggcgaggacgtggcttccatcttcctgcaagttgtaggtgagcagagaaagccgaggtggctgggccaaggggtgactccctgaggcctcgaggggccacctgactctcctgccccctgcagatgtcccagaccccccggaggctgtgcgcatcacctcggttggagaggattgggccatccttgtctgggagccaccaatgtacgatggggggaagccagtcaccggtgagtgcctctgtcctcatgacctctgaccttccctctttctgccttctgtttttttttttttttttttttttgagatggagtctcactctatcgcccaggctggagtgcagtggctcaatctcggctcactgcaacctctgcctcctgggtacaagcaattctcctgcctcagcctcgcaagtaactgggattacaggtgcccaccaccacgcccggctaatttttgtatttttagtagagatggggttttaccatgttggccaggctggttttgaactcctgaccccaagtgatctgcccacttcagactcccaaagtgctgggattacaggtgtcagccacggcaccagcctctgccttctccttgacctcccagagcccttagcatcctcagtgacctacctctgacccctgattttccattttcccatctcaatccctttggtcttcccgcttcctttactcgctggtgacctgggaattctcactttgaccagtagcctgggtttttctatggctcctggcctcctggttcatgagctgtgaccccctcttgattcctgactccaggactggtggcctctgaatgctctgtggcccctgagatccacctaagattcatggcctcggaccgccctggccatgcgatcctctggatgtggccctcactcccccagctgactcatgccccatgccctcccgttccctcttctcctctctgcttggagcctccagggtacctcgtagagcggaagaagaagggctctcagcgctggatgaagctgaactttgaggtcttcacagagaccacctatgagtccaccaagatgatcgagggcatcctctatgagatgcgtgtcttcgccgtcaatgctataggggtctcccagcccagcatgaacaccaagccttttatgcctattggtaatgtcctccctcacttttatgcctattggtaatgatggatcactctgatccatcaaccccgtccacctctggcccatcttttgcccgccatcaatctctgaccctaccccctggccttctgaccaatcattctacctctgactcctgccccttcctgctgacccctgacccctcattccccccatatcctctttttctggatgcttgcagcacccacgagtgaacccctgcacctgatagtggaggatgtgacagacaccaccaccacactcaagtggaggcctccgaacaggatcggggcaggtggcatcgatgggtacctggtggagtactgcctggaaggctgtgagtgaccctggcagggctggtgggggtggtggctagcacaggtgggtatccagtccagggagctgaaaataggaccatgtgggacagagatgggtgcagtggcctgcttgtgttttgtgtctgtactgttataagtctctgggatgggacccccctgtgactagtgtgttttctctcccttcttcctttctacatccatcctccatacagcagtgactttctgtcattccatctatccttccatccccccatttatcttttatcttttacctttatgccttctttctttcttctactcatttatccatctaaccaatctttccttcatccatcttaacatccacccatccatccatctgtccatccatctgtccacccatctgtacatccatccatccatatttccatccatccatccatccattcatcttaccgtccatccatccatccatccatccatccatccatccatccatcatttccatccatccatccacccacccacccactcatatttccatctatccatccatccatccatccatttatccatccatccacccatccatatttccatctattcatccatccatccatccatccatccatccatccctccatttgtccatctgtccacctgtccatcatccatccatccatccatccatctgtccatccatccatccgtctgtccatccatctgtccatccatccatctgtccatccatctatccatccatccatccatccatccatctgtccatatttccttcgtttctctctctctctttttttttttttttgagacagagtcttgctctgttgcccaggctagagtgcagtggcacgattggctcactgcaagctccaccttccaggttcacgccattctcctgcctcagcctcccaagtagctgggactacagatgcctgcaaccatgcccagctaattttttttttttgtatttttagtagagacagggtttcactgtgttagccaggatggtcttgatcttctgacctcgtgatccacctgcctcggcctcccaaagtgctgggattacaggcatgagccatcgcacccggcccagtatcattttttcatccatatatctatctcttcaccactatctttgcttccttccctctttctacctatatggccatccaaccatctgtccacctaaccagccattgtctctctgcctgtccatccatcatctgtacctccatacatccactctccatcctccaccaaacaaacattcactgagcactgacttgtgcccggcccagtgccatggctatggagatgtctcagacgcagccatctctctgggagaacagacgtgatcacctcgacacactatcccaggtcttaaagtcagacagatgcgggttccaaccttgcccctccactgtctaactgtgtgtccttgggcaagtctctgagcctcagtctcttcatctaaccatggcgaagacagttctcatcttgacagggtacagtgacgatgtactcgagaatgcatggaaaggagggatggttgaaccctcatcagcttcctccctcctcctctcctccgtgctctttaccccattcctccctggccggctgctcccaccctgacgtttcagaacccagcttgttagagttcactctgttgattgctgctctgagccaacagccatgagttccccagcccatggccataaacccaagacagaagggcatgtaacgaaaagcaggcaatctgaagagctctgaccctgccctcagcccgccttcccagacacccacctggctgcgccctcagacagagccaagatccctgcccctctgtgccagccttgcaggagagcagagcttgagagcgtgctggagtcagacaggcctgggtttaacatcctagtccacagagcctgagctgcgtgtccaggatggtcttgaattcctgggcttgagagatcctcctgccttggcttcccaaagtgctgggattacaggcatgagccatggtacctggggaaagtttttttttttttttttttgatggagtcttggtctgtcgcccaggctggaatgcagtggggtgatctcggctcactgcaacctctgcctcccaggttcaagcgattctcctgcctcagcctcctgagtagctgggattacaggtgcctgccaccttgcccggctaagtattgtgtttttaatagagacagggtttcgccatgttggccaggctggtcttgaactcctggactcaagtgatctgcccacctcagcctcccgaagtgctgggattacaagcatgagccacgggattacaagcatgttagggatggtttcccatccttaacatggggatagcacagggttgaggtaagaattaatgaacaacgcctataatcccagcactttgggaggccgaggtgggcggatcacgaggtcaggagttcaagagcatcctggccaacatggtgaaaccccatctctattaaaaatacaaaaattagctgggcgtggtggtgcgagcctgtagtcccagctactcaggaggctgaggcaggagaattacttgaacctgggaggcggaggttgcagtgagccaagatcttgccattgccctgcagcctgggcgacagggcgagactccacctaaaaaaaaaaaaaaaagaattcgtcccactgcactccagcctgggcgacagggcgagactccgtttaaaaaaaaaaaaaattaatgagcgaacagaatggccacccttagaacctggccatgatgaatgcttaactaactccagctgctgctgctgcttctactgggaacttactcagtgctcactcgctcgctgcgtggggcccaagtccccgggagaaacgggagcggaggatgggaggagggcacgagatccgccagcagggcctctctctccagccgaggaatgggtccctgccaacaccgagcccgtggagcgctgtggcttcaccgtcaagaatctcccgaccggagccagaatcctcttccgagtagttggggtcaacatcgcggggcgcagcgagccggccaccctggcccagccggtcaccatcagggagattgcgggtgcgtggcccctgaccctgcgctccgaaagaccaagctggcgtcgtcccgcctgccctttccgtgtcgtcgacaggacctccccagagagccttatcaccattggcccctggaatgcgccccggccccccgctgagccccctccctgtgtttgcgccctcagagccacccaagatccggcttccccgccatctccgccagacctacatccgcaaagtgggcgagcagctcaaccttgtcgtccccttccaggtcaggggagcggggtcacgggccgggggtccgctctcgccgcaagccccctttttgcgggtggagccccgctgaccccaccccgccccgccctctccccgcagggaaagccccggccccaggtggtgtggaccaagggcggggccccgctggacacctcccgcgtgcacgtgcggaccagcgacttcgacaccgtgttcttcgtgcgccaggcggcccgctccgactccggggagtacgagctgagcgtgcagatcgagaacatgaaggacaccgccaccatccgcatccgcgttgtgggtgcgcgcgctggggagggcccctggaggccgggaggggcagggatgggcagcgatgggggaggaggtaagagatgaggggtggggaaggaggtgggagatgaagggtgggagaggaggtgagatgagggatgggagaggaggtgagagatggggggtgggagaggaggtgagagatgaggggtgggagaggaggtgagatgggggtgggagaggaggtgagagatgggggggtgggagaggaggtgagagatggtgggagaggaggtgagagatggtgggagaggaggtgagagatggggggtaggagaggaggtgagacgaggggtgggagaggaggtgagagatgagggatgggagaggaggtgaggagatgaggaggggagggggagaggaggtgaaaagatgaggtgggggagactagataaggagcaaggcaagtaccagggctaggagtggaggagagatgaagatgggggaacccttgagagggagattgggtgaagagaggaagtggggagacatgggggtgaggagaggaggtgaggagggatgagggtggcccaggataagaggaagtggagagactgggatgggggaggccataggcaggaatgggaatggggcataagagaggttagaatcaggagggagggggtgtggagaggggaggggagggaagcggctggacatcccaaaacctggactgacttgtcacacttccccatttccagaaaaggctgggccccccataaacgtgatggtgaaggaggtgtggggcacgaacgcgctggtggagtggcaggcccccaaagatgatgggaacagtgagatcatggggtatttcgtccagaaagcagacaaaaaaaccatggtgagagagcagagggggagatggggaagagccggtgaggtgggcagagcaggtgcagatgtcccccgttcacagctggaagggcagggaggggcccagaggctagaggacgggctggggccaggagggaagccttttagctgagacttggcacgtgatgggttttcattttcttttttcactgaggtaaacgtcacataacggaattagtcattcatcgttttaaagcgaacaattcagcagcacttaggacatctgcagggttgtgcagccaccgcctctacccagtccattttcatcccccagaggaagccctgtacccaatagcgctaccccctggtctcccctggcagccaccgatttgctttctgtctccctggatttacctactctggacatttcatacacatggaatcctagctatgtgacccttgtgtctgactttgttagctcagcacaacgtctttgaagttcatccatgctgcagggtgccgggtgtgtccatgcagaaatcctgtttttagaattcttttttttgagacagggtcttactctgtcacccaggctggagtgcagtggtgcaatcttggctcactgccttctctgcctctgagctcaggtgattcccccccatctcagcctcccatgtagctgggaatacaggcacgtgccaccacatcccgctaatttttgtagagacagggtctcagtatgttgtccaggctggtctcgaactcctggacccaagtcatcctcccaccttggcctcccaaagtgttgggattacaggcatgagccactgcacctggcctttatttcttttaaattttttttttttttttgagacagggtcttactctgtcacccaagctggaatgcagtggcatgatcatggctcactgcagcctccaacccgcaggttcaggcaatcctcctccctcagcctcccaagtagctgggactacaggtgctggccaccagacctggctaattttttgatttttttaacagacaagggtctcgccgggttgcccactctggtctcaaactcccaggctcaagcgagcctcccacctcggcctcccaaagagctgggattacaggcatgagccacggtgcctgaccccttcttagcgttgaatgatgttcctttgtctgggccgactgttttgtttgtccatccctgcgctgatgggcgctgggttggttccacctgttggccactgtgagtagtgcgccatgagtgacatttttttaaacactggatgtgcttttctcaccccttctttcgtctgtgtcttgtgtgtaatcgtgtgatcctgtggccccgacccgcctggtccctccctgtccccacactaggagtggttcaacgtctatgaacgtaacaggcacactagctgtactgtgtccgaccttatcgtgggcaatgaatactatttccgagtttacaccgagaacatctgtgggctcagtgactcacctggtgtctccaagaacacggcccgcatcctcaagacaggtacagccatcctgccccacagcccaggcccaccccgtccaccctctcgcccaggtcccacctggactcctgccctcccctccccactggggttgacggcacctagtcatgggagagaggtgattgcggtttgttccctggttggtgtcaggggagaatctagatcagtcgccttacgggtgcatcctctctccccaggaatcaccttcaaaccgttcgagtataaggagcatgacttccggatggctcccaagttcctgacacctctcatagaccgcgtggtcgtggctgggtactcggcagccctcaactgtgctgtcagaggccacccgaaggtgccagggcagggacccagatctgcgtgtgtgttgccttgtggggaatcttccatacaatgaagcccactccccatcacgccagttcttcttccccgagttctctgtctcaagggatttagtcacttaaaaaatttttttaattgatttttgattttttttttttttgagacagggtcttgctgtatcacccaggctggagtgcagtggcacgatcacagctcactgcaactttgacctcctgggttcaagtgatcctcctacctcatcctcccgagtagctgggaccacaggcatgaaccactgtggccagctaattttataatttgtagagatggggtcttgctatgttgtccaggctggtcttgaactcctaggctcaagtgattctcccgcctcggcctcccaaagtgctgggattacaggtgtgagccaccacgcccagactggacttgctcacttttcacccacttcctgttagctcctctgaccagagcccaagtctcagacaatcaatcacatcttgcctttggcttcctgcctttttccttctttctttctttttttttctttctttcctgagaccaggctggagtgcagtggtgcgatcttggctcactgcaaccgcctcccaagttcaagcgattctcctgtctcagcctcctgagtagctaggattacaggcgtgcaccaccatgcccagctaaattttgtatttttagtagagacggcgttttgctgacctcaggtgatccgcctgcctcagcctcccaaagtgctgggattacaggcatgagccaccgctcctggcctcttgcctttttctttgtcccctgactgccaggtaacagcttgtctcggcagcttgaggagaggaccattaagtctctcttgctctgtccaaggacaaatgccagtcccatggaaaaagaaacgttgggagcaggggcagcctagaccagcacggctccccagggtcttcctgtccagccattttccaactgctctttgtgaacagggacacttgcaacctagagctcatttagaccaggggttggcaaaccatcacccatgggtcaaatccacccaccacctgtttctctcaataaagttttattggaacacgggccaagcatatttgtttatgttttgtttacagctactgcagacaaaatgtaaataaatgtgcgtggctcgcgttccaggcccagagactacagggcccaaaaagcctgaattatttaccatctggtcctttataggaacagtttgccagcttctggtctgggctgtaggttattcgcttcagcctccttaaggcataccatgtctccatctctgtatactgtattcactaactccactcattcatgtcactcattccactcatttatccacctaccaatccatccatttactcagttcattccttcactccatttgcttatttacagcactgtttcgtgctctcattcatttattcactccatttattcttacaacaaacattttcagaggctttcaatgacctgggtgattcgaacaagaaatttcctgtatgttgggggagactgacatttgcccagagtcacataaataatataaaattatgaagggctgggccagacacggtggctcacacctgtaatcccagcactttgggaggccgaggcgggcagatcacctgaggtcaggagtttgagaccagcctggccaacatggtgaaaccccatctctactaaaaatacaaaaactagccaggcatggtggcaggcgcctctaatcccaaccacttgggaagctgaggcaggataattgcttaaacccgggaggtggaggttacagtgagccaagatcacgccactgcactccagcctgggagacaaagcgagattctgtctcaaaaaaaaaaaaaaaagggaagggcactatggaagagggaacagccagtgccagcgtcctgaggtgggtgcctgtctggtctgtttgaaggacagtgaggtagcctgtttggctggagcagagaagtaatgggggtcaaagagtgtgggaccctgtgggccactacaaacagtgagctctttgtcctgagagcaatgggaagaccccaccgttaccctgtgaagtgggattatcaacctgcttttacataagaggagactgagggtcagggagaagtgactcgtccaagaacatctggcaagagggtggcagagcctagaacccagatcggcttcctgagccccattttgtcatcattgcccagggtctctctctaagttggcctcctctcccttgactctcaacagccgaaggtggtctggatgaagaacaagatggaaatccgtgaagatcccaagttcctgataaccaattaccaaggagtcctgacgctgaacatccgtcgcccctcgcccttcgacgctgggacttacacctgccgggccgtcaacgagctgggcgaggcgctggctgagtgcaagctggaggtccgaggtgagggcgtggccatccccaacactggctgacccttgctcgggccctgtgccagcctggccggtggccccgggctgagcaccgctgagatctggagacgagtgagaccagccctctgggaggaggactgggaagctgctgtcctgaaggcagcacagggcatcctaggagttggggttggggagcccctgacccagcttgggaaggagtcagatttttccaaaggagttgaaggacaaggaagaggaaggctgagtgagaagggcttaggaaacgtccccaaggcctccagtgtacctgggcccccgtaggcagatgggttgacagagtgagagcaaatatggataacacggatgaccaggggtggcgggagctcccaagagtgcctccctccatagcctgtccccatgctcccacccacctgcccctgcctctccctgccccgtccctcatctcggtcccacagctccagccccagcgaaagctacatcctcttcctcccatattccatttccagccgcctccgtctccagtctctccctcctgccagccactttcacccttggactctggccccagagagctctctctatccagagctgctctgccccagccctgatcccagcccgctggggactccccaccgccccagcgcccctccgcctggtgttcacggtggtgtgtccaccccggttcttcccacatgatgtcccagccacaccgggctgttggcagttacactggccaggctttcctgccacagggacttggcacatgctcttccctcttcctggaacacaattcccccgctcctttaccctgggctccggcccatcagatgtctgccagtcaaggctcagcgaggaggccactaaccgtgtccctcagagcaggatgacatcaatgtggacttccagagtccctcccggatggtgacttctgacctctgacttccctggctctgaggacagcccagcagacagggtggctggggacccttaacaaaggctcagagaggacactttctagccaagcacggtggctctcgcctgtaatcccagcacattgggaggccaaggcaggcgagttgcttgagcccaggagttcaagaccagcctgggcaacatggcgaaaccctgtctctactaaaaatacaaaaaaatttagccgggcctggtggcacatgcctgttgtcccagctacctggggggctggggcaggaggatcacttgaaccagggaggccgaggctgcagtgagctgagatggcaccactgcactccagcctggtgcaacagagtgagactctgtctcaaaaaccaaacaaaaacaccccagatcactgcccttccaagcccacccaatttctgatactctgctgtctccctgattaactattaaatcagctcagaaaaatcccagcctcaggattccagtgaccgcgtacagccagcagctcagaatgtccccatctgggatccaaaataccagtaatcaggagcactgtgactctgggttgtccagccacagtggcctaggatggggcgggatggtgaccgtcatcctgtccccctgctggtcatgtggatgcagctcctcctcctggggcttcaggaggaggcgtgcccgggcctggctcacccgctttctcgttttcctgcagtgccgcagtgagacctgtcccctacctgccaagacaattggtggtggagtcctgaccccaatccccaacctcccaggactgtgttctttctggagttttcgctgagaacaaaacagtgttgtctggaccctggagtgtctgtccttcttgactccgtagctccgtcttcctcctgcaggggattggtcaccccggggttggcgacgggagcagctgcgtcgacacaggccgcggtgaggtggcctcttggaatagctactttagcgaggcagccacgttgtcacagcaaccacagagcatcagaggtgaacccaagcccacggggaggccggccccagagaagctgctgggagggagggagggtgcaggctaggggcaacgacagtggcagcgagtcaaagacacacccaggccacacccagaaggccactctaccgaagcagctgtgtcgctgtggccgcctctaggccttggcagcggccccaagagctagacgtggtgaaccgaagagggaggcagccgtactggacaaactcctgccaggcagctgcgcggacttggtgacgaaggcgaaaccgctcgtggcctgcttgttggttcttaatggactgacctttattaactttaatatctcatctgcccggccctgaggcaaggtactttgatctctggtcattcggtgaccttgaaggatgctggaagactcagagtccccagagttcagaggtcttggggtcaagtctggcttccacgccttggggctggggagagagagtttgtttcagaggccttggcctgcagttagggagtgagggggcggggagggactttgcacttactggaatggcaggggaagccaggtgtcctaagagggggcacagattccagtgcccccagcttctaaaactggcatcatcccctgctccaccttgacccccaaggccctacagagaactggacattgggcctggctgaccccactccttcagggcacaggttgtccctctctagaccctactctggtatgtcacggggagaggggctggggcacgggtgtgggtggctgtgtgtgttcccaagtaggatacgacagcccccttggctaggggtgccaaggccctggagagactgctggcttctacccacagacccccatatccctgggtcacctctacttccagaaccaggagtccaggccccagcccctcctccctcagacccaggagtccaggaccccagccctcatctccctcagacccaggagtccaggacccaagctctctcctctcttagacctgggagtcctcagacacctcccctctgccctctgctgccccactgcgcttcccccctctcctcacctcctcccactccctctgggcctccacctcatcatcatcaccctccccatctacatcctccagcacctcttactcctgcgtgaagggcacagcagaagcagagaggaagcgcaggcggtagagcagccgcacccactggccgaactctcggtctcgggtcttgagtggggcccgcagctgcaagtagaaggtgcggctggtgttcaacttgacctcgagctgacaccggcttttgtcgtggacaaagagctggacgaacttcaaggggaacagcctgggtgggaggaaggggcggcctcaggttctgaccctgtcgggtcctccagcaccgtcggggtcaggggtccccaccttgccacccctccctctgccccacgaatccctttccactttcattgcctcttgaacttgagtccattcccaactttcttccagccacatgtctcctttttgtctcccactagtcctctcccctaaactccagactcgaatatacaactgcctacttgaaatttccatctggggccaggcgtggtggctcacgcctgtgatcccagccctttgggaggctgaggcaggaggatcacctgaggtcaggagttcgagaccagcctggccaacatggtggaaccccatctctactaaaaatagtaaaaattagccgggcgtggtagtgggtacctataatcccagctactttggaggctgaggcaggagaattgcttcaacctgggaggcggaggttgcagtgagccgagatcacgccactgcactccagcctgggcgacagagagagggactgtgtctcaaaaaaaaaaaaaaaaaaaaaaaaatcccatcttgggtgtgggatctaccatccgactcataacatgttcaacagcccacttctcaagctccctcagcccctcacacgcagcctactcctcttggtcttccctgtcttagctacatccccctcttgcttggtcaaaatcttggagtcgctgtggactccatgttctcacaccctgatgagtcctgacaccacatcctggtggctccactattttttgttggtttttgagatagagggtctcactctgttgctcaggctggagtgcagtggcacggtcatagctcactgcagcctcaacatcttgggctcaagcaatcctcttgcctcggcctccagagcagctgggactatacgcgcaccaccatgcctggctaatttttctatttttatatagtagagatggggtttcaccatgttggccaggctggtctccaactcctgggctcaagtgatcctctcgtctctcaaagtgccgggattataggcatgagccacctcactttgcctgccacctttaaaatgtatccacaatccaaactcttttaactccctcctccgccacccttgcgtccagccacctgcctcagccctcagtccctacagtctgttccccacaagtcccccagaaggcgcaggtcaacaccttgggcagtttgggtccctctgctcagagccttcctgtggctctggctcaacaggaataaacacaaagccctcaccgtggcccacagacctgcagagccccttgctccctctctgccctcacctcctgcacctccagccacactggcctccctgctgttccatgaacacaccaggctcagtccgaccctagcacctttgcacagatggttccctccacctgaaaagccctttctccaggcaagacccgccccctcatcgccctgtgtttcaggaggcatgttctcagggatgtctcccctggcctatttcaaccacatccaccctgttgagacttccccgtagtcctttccggtctgacggagccccacaggccttgcccatctaacaaatggccacctgttccctctgcctgcctggtagagtgggagctcctggagggcagggagttcctggaggcctgctttgtccagtggtgaaagtttccctggtacccgcagctgacacgtggcaggtgctcagtggatgcttcagtggatgctttttgagtatcttggtaaattgattgctcaggcccgcagcccgatttaaggtccaacagggcagagcaggaagcagtcaggaaagagtgaggatcttggctcaggtcacacagccaggattggagcccaggtcccatgttcacctacaacactgagtagccaggtggcctctctggtccagcagtatcactgccaggaatggatctcacagacaccctcacacctgtgcacagacacatatgcgcggatgtcccctgccacaccgcctgtaaccgagatgccaacaaaccccagtgtccctcagtgggtgacttgatttttgtcccccaaatagaagaataacagctgacatttgtggagcacttactcagagccagttgctattatatttacccagtttttcccccgacaaccttatggggtgtgctctcctcttatccctgtcatccagatgaggaaactgaggcacaggcaggtaggttgagcttggccaaagccagtgatgaagtaacgccaggatttgaaaccaagccgtctgagggcaggcatttgtttaaggacgttgcctaccactttaacatgaggaggctggacacagcttggtgtctaagacagcagagcacgtgcaatggtcaaaaagaatccaactgtgcaggctgtgcacggtggctcaggcctgtaatcgcagcactttgggaggccgaggcaggcggatcacctgaagtcaggagtttgagaccagcctgaccaacatggcaaaaccctgtctctactaaaaatacaaaattagctgggtgtggtggcacatgccagtaatcccagctacttgggaggctgaggcaggagaatttcttgaacctgggaggcggaggttgcagtgagccaagatcatgccactacactccagcctgggcaacaagagtgaggctccgtctcaaaaaaaaaaaagagtccaattgtgcaaatatgtctgaaagagtgtggtggctgtgctcatggcaatacaaaacggatatgggtgtcgtgctgacgagggggtgggcgcagggagaagtggcgtatggcttgtggctactgctgtttttttttttttttgagatggagtctcgcactgtttcccgggctggagtgtaatggcgcgatcttggctcactgcaacctccacctcctcggttcaagtgattctcctgcctcagcctcccgagtagctgggattacaggcgcccgccaccatgcccggctaatttttgtattttttagtagagagggggtttcactatgttggccaggttggtctcaaactcctgacctcgtgatccacccgcctcggcctcccaaagtgctggaattacaggtgtgaccaccgcgcccagcctgtggctactgctttttattttattttttgagaaagggtcctgttcccattgcccaggctggaatggagtggcgtgattacagctcactgcagcctggacctgctgggctcaagcaatcctcccacctcagcctcctaagtagctgggactacaggcacaccccaccatccctggctaatgtttgtatttttagtagagatggggtctcactatgttgcccaggctggtctccaactcctgggcttaagcagtcctcccaccttggcctcccaaatgctgggattacaggtgtgagccactgcacccagccttctactgctggtttgtttgttttgagatagtgtcttgctttgtcacccaggctggagtgcagtggtgagatcttggccactgcaacctccgactcctgggctcaaatgattctcctgcctcagcctcctgagtagctgggactacaggcgcccatcatcatgtctggctaattttttgtatttttgtagagatagggtctcaccatgttggccaggctggtctcaaactcctggcaatcaggtgatctgcccacctcagcctcccaaagtgctgggattacaggtgtgagccatcacacccagcctctactgctgtttttaaagaaaggatggatccatatatatgtgtgtatatatatgtgtgtatacatgtgtgtatatacgcatacatgcacgtgtgtgtatacgcatacatgcacgtgtgtgtatacgcatacatgcacgtgtgtgtatacgcatacatgcacgtgtgtgtatacgcatacatgcatgtgtatacgcatacatacctgtgtgtatacgcatacatgcatgtgtatacgcatacatacctgtgtgtatacgcatacatatctgtgtgcatacgcatacatacatgtgtatatgtatgcatacatgtgtgtatatgtatgcatacatgtatgtgtgtatatgtgtatatacatgtatgtgtgtaagtatatatacatgtatgtatgtatatatacatgtatgtgtgtatatgtatatatacgtgtatgtatatatacgtgtgtatatgtatatgtacgtgtgtgtatatgtatatatacgtgtgtgtatatgtgtatatatacatgtgtgtatatgtatatgtatatatacgtgtgtatatgtatatatacgtgtgtatatgtatgtatacgtgtgtatatgtatgtatacgtgtgtatatgtatgtatacatgtatgtgtgcatgtatatacatgtgtgtatgtatatatacatgtatgtgtgtattatatatacatgtatgtgtgtatatatgtatatatacatgtatgtgtgtatatatgtatatatacatgtatgtgtgtatatatatatctctctgtcagaaactgccccagaatagctcagggctggaagttggttagacagaagtgaggggctaggaggtgagtcctgaggccaaatttgcagagcaagctcaatgttctcacttcagtggtatgttcatttgggaaggggttttagggtgccaaaggagcttatgagagggtcatagccactctcagcaccatcattggtgttcttccaactgcaggtcatgattcagtgagtgatgagatcaattggtgaaatacagttagcatttaaaataaaaggggctgggcaaggtgggtcacacgtatagtcccagcactttgggaggttgagggaggaggattgcttgagcccaggagttcgagaccagcttgggcagcatggtgagacctgtctctacaaaaaaatacaaaaattagccaggtgtgggtggtgcacacctgtagtcccagctactcaggcagctgaggtgggaggatcgcttgcgcctgcagagaactgtgatcactccagcctggatgacagagtgagaccctgtctcaaaattaaatgaatgaatgaataaataaaggccaggcacagtggctcatgcctgtaatcctagtgctttgggaggctgaggtgggaggatcacttgaggcccggagttcaagaccagcctgggcaacatagtgagatcccacctctacaacacataaacaaaaataaaggtatagtgtagaagagaaaatatctcagggtactgtactggtgtcagaatactcctttgtgaaaggtttttaacttaggcagggggattaataaaggctgtaagtcatctcgagtacatgcaggtcaaaatctgatttggccacgaaattagaaaagcaatcttttggatttcagaaatgcagagaaggaactgtggaccttcatgtgtgcatgtgtgagacaatgtgagtttgtccttccttccttccctccttcctctatttctccctccttactttcttccctttcttcttttctctgtcttctttcttccctctctttctttcttttttagagaacgggtctcacttcattgcccaggctggagtgcagtggtgtgatcacagttcactgcagcctcgaactcctgggctcaagtgatcctcctggctcagccccagtagctaggaccacatgtatgtgtcaccatacctggctagctttgtaattttgatttttgtagagatgggggtcttgctatgttgcccaggctggtcttgaactccaagcctgaagtaatcctcccacctcagcctcccaaagtgctgggattacaggcatgagtcaccatacccggcatctctctttcatgaactgtgagatgtggtcaaaaaagtgaaagccagacaggcatggtagctcatgcctgtaatcccagcactttgggaggcccaggcaggcagatcacctgaggtcaggagttcgagaccagcctggccaacatggtgaaaccccgtctctactaaaaatacaaaaattagctgggcgtggtggcaggctcctgtaatcccagctactcaggaggctgaggcaggagaattgcttgaacccaggaggcagaggttgcagtgagccgaggttgtgccactgcactccagcctggagactctgtctcaaaaaaacaaacaacaaaaaaagtgaaagctactggcagaatgtttctgtactgtaggcatgtaaacatttcagtgtttgtagctggagttggggcaggagccttgggtgagaaaaaggaacagcttctgctgtctattttgtgcttgttttctcgtttgtttgcattactttttcttttctcttttcttttcttttttattctctctttttttttttgagacagagtctcactcattctgttacccaggttggagtgcagtgggatgatctcggctcactgcaacctccacctcttgggttcaagcaattctcctgcctcagcctcccgagtagctgggattaccggcgcccgccaccacacctggctaatttttttttttttttttgagatggagtctcgctctgtcgcccaggctggagtgcagtggcgcaatctcagctcactgcaacctccgcctcctgggttcacgccattctcctgcctcagcctcccgagtagctgggactacaggcgctcaccaccacgcccgactaattttttgtatttttagtagagacggggtttcactgtgttagccaggatggtctcgttctcttgacctcgtgatccacccacctcagcctcccaaagtgctgggattacaagcgtgagccaccgcacccggccctggctaattttttgtatttctggtagagacagggttttgctatgttggccagaccggtctcaaattcctggcctcaaatgatctgcctgccttggcctcccaaagtgctgggattacaggtgtgggccaccgcacccgatctgcattactttttcaatgaaaaaatatgacgtaaaggggcagtgtggagtgaggcacaggagggctcaagaaccatgagatccacaatcatgacaagcttggcattccaatcctggcccactctggagccacagtgggaccctgggcaactggctcccggctctctgagcctcagtttagctctttggcggatggggctaagggaccccaccatgtgaagatatgaggtcagaggtgagatcgtatgcgcggcctaggggcgtctggcatgagcaggccctgcggaaatgatcattctcctgaccgctgctggggcatggctgaggactgtccccttcaggtctgtctaatctctgatttctggcccctgagggctgctctgtccttgttctcccgggtagatggcagctcagggagggccggtagcactgccagctcctggccctgggggtggtctggacgaggggaggtactgctgggggctcaggtgcctggagctgagggaggaaggggtctcggctgaggtgggggcagttacccgaagagttgcaggtgtccgttctccttggcagggccggccagaagcaataggtccgggagctccagggctggactggaggctgccacccccatggtgacctcgttggcaacttctcccaaccgagtcacctggggccagaggtcagaggtcggggcaggatagatgtcggggcagaactgaggagggatcagaggttaggaatcttggtaggggaaaaggtcatgaaccaggtgagttgaaaatcaggctgggggccagatatcttgaaattaaagttcaagaatcatatgggtgtgaagtcagggaaactgaggcaagggagttacaggccagggttcacaaagaatctagagaactagaagtatggggtgtcagagatcacataggagttgggagtcgggaatcccacgagatggacgttatgggggagcaggggctttccaagtcaggaggaggtcgaggggcaggccgaggctggggatgagggggttctggggctccctacctgtacgaagttgctctcaaagatggggaagtcccgaaactggtcgaattcgccgctctggaggtagcgttggagccgtctgggacggcccgtgggagaggctgcaaccaggaggcattttaccaggacgaagtctgggggtcgatcctgggaggctgtgcctggcttcccaactgagagggcccggcacagccccgcggagaggacggggtatcagatgcccccgaattgccggccccatcctacttggttccttcaccaggtccaacccctctaggcctggctcccctctctcacctgccatcccacctggttccacctcgccagctccacccagggccggcttagggccgcgatcccgcctcattgcaatgtccccgtccgacgggagcggacggaggagcagagggagaaagcgagggggcgggactacgcgcactgtgacgtcatgatgcggagcgggctttatgacgtcacacaagagcgggctcctgatttgtgatgacgtccctggagggggcggctcctggagatcaggccaaaggggcggccccatcctgctgacgtcaggccccaggtgcggacgggtgccagtgcgcaggtgccggggcccagcgcaggcgcacgggcgtcaggatgcggcctgttcctcccggcgtgctccgcggctcttggctcacagccgtcccttcgctggtgggaagaagccgagatggcggcagccagcgctggggcaacccggctgctcctgctcttgctgatggcggtagcagcgcccagtcgagcccggggcagcggctgccgggccgggactggtgcgcgaggggtgagtgctctttagctgtgcatagcgggcgcggtctacggatgtcgcaggtcttgggtctttaggtgagttacagacggaaggaggctgcgcagggctgagagggaagaggtgggagatccctggaaagccaggcctcagtcacgcacgcgcaggaggggcctcgccagtgcaccgggttgcaaggactgggtgggaggacaagcgcacctgtcggaaggctctggctcgggaatatgtatgagggggcggggctgggggtgtggaatcttggagaatccgacgtccgggcggttgaaatgaaagaggcaaggtgaagccgggcgcggtggctcatctgtcatcccaacgcttagggaggccgaggcgggaggattgctctaggccaggagttcaagaccagcctgggcaacatagcgagccctgtctctacaaaaaatactaaaaaaaaaaaaaaaattaggccggtcgcggtggctcatgcttgtaatcccagcacttcgggaagccgaggcgggcggaccacttgaagtcaggagttcaagaccagcctgctcaaaatggtgaaaccccgtctctactaaaaacacaaaaattagctggatgtggtggcaggtgcctgtaattccaactactcgggaggctgaggcaggagaatcgcttgaacccaggaggcagaggttgcagggagctgagatcacgctactgcactccagcctgggcgactgagcgagaccctgtctcagaaaaagaaaataaggcgtgggagggggctcttgaggaagtggagatgagttttgtctcctaaatatgcgtgagtatgcaagtttggaggttggagaaaaggaaagcatgaatcttgaatgtgcttaatagggactgaactcaggctgcatcttggctattgggctgtcaggtgataaggaggccatttgaatattagcatgaaaaagaaggcttgggagagggagagtgtcatttaactcatgagtatttgtggcgcaaggcttggaagtgaccttgggatagttgctttggcaatgaggttaggcatgtttgtagggtctggttttctgggggtgagggagtgcagagtatgaatattcatgaaatgggtggtttctagtgaaataaaggcaagcagcagtgattaacttgaagataaggctcctccctcagcccaccagtctgtctgtcctgggttctgtgggtgactactatgctgagggcttgggtggtcctcacctggggccttctgtgtcctctgcaggctggggcggaaggtcgagagggcgaggcctgtggcacggtggggctgctgctggagcactcatttgagatcggtgagtcaggcaacgtcctctcctagacacttaacattggtgccctgagaagtcaagacttggagtctgggtgcctcccgtcgtatgacatttactaacaaccatttactaacagatttgcctcaggttaggggaaagtgggacatgaaagaagagaaacactctttaaatgcccccttgcctgtgagacaaacctcagtttttaaaaggtcatcacagcagtaataatttcagagcggctttcctgatcagtcgccacgtgcccagcattagcggttccacgctttgcaagtattaactcagatgtcctcacagcagccatgtgaggtggtaggtattcgtgtcagcccctttttccagaagaggaaacgggctcagagtaggcaccacacaaggtctcatcgtgagtgagtggcagagcaggggccagcttcaaacccaaacttaaattgccatgatgcaggtgtccaggttcccagagctggacgtcagtgctgcccagagtgtagtaatcgagtctgaggccccgaacctgagggcacaaaccctgaagctggtgcccctctgcaaaccctggcatctgctcagtgaacagctcccctgattctgacatggccaggtagttgggaattcctgaactccacagcctccgtattttgcagttggggaagctgaggctcagagaggttgtgtggctatccctgggtcacctggtgaggcagaggcaggatttgggagctgtggggttcatgcatctgctacgggttgccttgtgaggtggaacatggtggaggtgtccccactttgcagatagcaaaatgggggcccagatggggagggaacctggtcactcgggtggaggccaggccaaaatttgaagctggacctcctggcccctgcctgggttgaagggtgggcgggggagggggcgtctctgaacctgagctcctcacagatgacagtgccaacttccggaagcggggctcactgctctggaaccagcaggatggtaccttgtccctgtcacagcggcagctcagcgaggaggagcggggccgactccgggtgaggtggggccctcagggctgggtgtggatggggatggagggtttccagctgtctcttcagccaccccctgctggtccccagcagccttccctccaggcccaggtgggctcccagcaccacctgccactctcagcctctgtcctcaatgactgcccctggaggaacggcattgcagttcgtcttagcgccgccaggcatggtgtcctgcatcacggcctcttcctgcactgctccctctgctggcagacccccttcccctgcaggttcacacagtcggctcctcttcttttccagatcagctgagctgtttcatgaccacttagatgagatttgtttgtgaggagaaagcctcaaaatagctatggttggacaggagctcacttctgtcgccctgtgttgtggcagcctcaagggcccagctcaatcctccgcaggggtcatgcagagaggccccagggctccaggcagcaggatagagagggagaaagaggggcagaaggagcagcagcatttagagaaagcttgcaaaagctggcacaacccacttccacccatcagccagatgtagctgtgagggaggctggggagtgcaggcttgattctggtggccacgcggtgaggtctgcctgagcacccttcctgcatggtacccacatgattctcttgtcacagctgtccccaaacagaatttattatgcatgtaactggtacgtccaggcatagggtggacgccaggtgcagctggatccaggcacagggaaggcgtcctcaggacccactccatcgctgggctgggctttgccctccttgtggtggcttttcccctaggtggggcggtcccagctgctcctggcctcacccaccagccgggccaccccaacaggaagagtcctgggtcgactcaggttggctggcctggggagtgtgggccgtgaggtgggtggggctggagaggggccttcgcggaggcctggtgggcatcacagcctgtccagggctgacaccatccttctgaccagcaccctcttctcccatccccaggatgtggcagccctgaatggcctgtaccgggtccggatcccaaggcgacccggggccctggatggcctggaagctggtggctatgtctcctcctttgtccctgcggtgagttggtgtcggggatgagcccccttctccctcgtcctcctcatcccctaccctggtcctgcttccaccattcgaacccctgtgtttctggagcccgcagaggcctgggagactcagacctggccttgccttccgaggcctcctggtctggaggggtcggtccaggtagcgggtgctttcatggggatagcattgtgaggactcccgggtggggggcggttgaacttgggcctgagggtaacagggagccatgggaaggttttgaaaaatgctccgggggtcctgtggtgggggccgggggaggttagggtggagcccaggcagcaggctccccacctccactgaccccactccccccacagtgctccctggtggagtcgcacctgtcggaccagctgaccctgcacgtggatgtggccggcaacgtggtgggcgtgtcggtggtgacgcaccccgggggctgccggggccatgaggtggaggacgtggacctggagctgttcaacacctcggtgcagctgcagccgcccaccacagccccagggtgagcctctgctgccttcgcggcgctcttgccacctgccccggcccttcctggcggcctcagggtctccaggtccctggactccgggcctcacccttctcctcctctccccttgccccagccctgagacggcggccttcattgagcgcctggagatggaacaggcccagaaggccaagaacccccaggagcagaagtccttcttcgccaaatacgtgagtggggctcccccgcctcccctattcccttcctgacagtcccggtgcctggccaggccctccatgctcccacccagactcccctatggtgctcgggcctgctccttgtcctccgggcctcctgtgtgtcctggtacctgggctgaggcttgtttgcaggaagagggtatggaagtgtggtcaggggaggtcgggccagctctagggcgcagggtcctgggggaggtctcggcctgagctaggttggagccatgaggctggagaggaagggaacagtggaggtttcaaaggaaccagggaggcttggaaaggaggggcgagcaggttcttcagggggttgtacaggaaggagagaggagtgggtccgggagggatgtggcccagggaggggcattgggggcagcagggtgcctgggaggcctcctggagctgaggagggaggggcctgtgctgccagcagcaggtctgagtcccgggggcttagaggctgaggcgtggggtggggaggctggggacagccggaggaggtggcttccacccaggcctctggtccattgagtgtggagactggtgttaggttgtggcacaggagcccaggcaggccaaggccagcgaagaggtctgtgtggcccgaggcaggctaggaggatgctgaggctgggatggctgagccctgctgtgctgagtgccctgcctgagggcctcacccgctccgcctggatagtccaacagttgtgctgcagggaactgaggcccagaggctgagcccttgcctgctgggccctgccctgctgcccactcgagcgccctcccactccctgctggccctcaggccccacggcagcccactggccctgacctgcgctccctccctccccagtggcacatcatcctggggggggccgtgttgctcacagccctgcgtcctgctgcgccagggcccgcgccaccgccacaggaggcctgagtgaggaccgagacccctgcccctccctgcgccccactggccctccctgacctgtagtgacgtaggggacctgggcgccctccccttacgcgacctcccctcatgccggtccccaccgtgggtgggtgatgcccacactcacctccttcccctctctctctctttctgtgtctgtctgtccatccttccgtccggctgcagtggatgtacatcattcccgtcgtcctgttcctcatgatgtcaggagcgccagacaccgggggccagggtgggggtgggggtgggggtggtggtgggggtagtggccggtgagggcccaggctggtcagcgtcccgtcttgcacacccaggggcctccctttctgctggagtcccctgtgtcctcagccatcccaagaagggtttgctggtccctcctttccccccgtcccacgaggccacctgggccagccccttgtcctctgccttctgctggcagaggagcagctggactggggcctttggcacagcagccggtgtctcctgcgcccgcctcccccatggccccatgcagccccaggggcttcccccctgcccatggagtagagcccgagatcctggccactatgccagttctgacctcgcatccccctaccccgagcccatgcagtctgggaacatgccgccttctctccagcctctgtgcctttgttccaggtggtctcaccctcctgtccctggctgggctaggtggtcctgtccaggctcctgcagcgcccccctcactttgacactggactaggatgcagcctcccttctgtgtccccttgagggtaccctgggtcccctcatcaggggcagaggcatgaaagagtcggggctggatggccgggggcttctgggcccgacgcctagtgcagcccctggggtcgtggtttgacatttgtctgcctggtgcaaacaaggaatccttgcctttaaggtgacaggccctccacaggcttccagacttgaaggaaaaggtttaagaaagaaaacaaaaccaacagttagtggagtcaaagcccagacactgtaaatagaaccccctccaccaccccccgccgcccagcatcctacctggactgcggtgctacgagggcctgcgggcctttgctgtgtgccaccctccctgtaagtctatttaaaaacatcgacgatacattgaaatgtgtgaacgttttgaaaagctacagcttccagcagccaaaagcaactgttgttttggcaagacggtcctgatgtacaagcttgattgaaattcactgctcacttgatacgttattcagaaacccaaggaatggctgtccccatcctcatgtggctgtgtggagctcagctgtgttgtgtggcagtttattaaactgtcccccagatcgacacgcagctagcctcctgcattgtatggttataaatagcaccctagtgagtgctgtcgtccagtctctcttgggtgtggtttgaatgatctcgggatgcatgactaaaatggaattacgatggcagatcggaaacgcgtttataaacaagtgatggtttgtgagtcgactgtcaagaccaggaggtggtgcaccgtgggaggttgccttccctcccatcacttctttttgtttttgagtcagggtcttgctctgttacccaagctggagtgcagtggcggtaccttgactcactgcgacctccacctctcaggctcagcgattctcccacctcagcctcctgagtagctggaattgtaggcgtgcaccaccacgcgcagctagtttttgtattttttgtagagacggggtttcaccatattgcccaggctggtcgtgaactgctggactcgagtgatccacctgcctcggcttcccaaagtgctgggattacaggcgtgagccaccgcgcctggcctatttttggtaactttaataaagaagatagtcttagcattgctaacttctgtttctttctccacctgcaggagatagcttatgctttttctgtcttcattccatgtgaatcctgcttcattcttttcctagaggattccagaaatatttactaatgctttttttttttttttttttttttttttgaggcagagtctcgctctgtcatccaggctggagtacaatggcacgatctcagctcactgcaacctccgcttcctgagtttaagcgattctcctgcatcagcctcccaaatagcggggattgcaggcgcccgccaacacacctggctaatttttgtattgttagtagagacagggtttcaccatgttggccaggctagtcttgaactcctgacctcaggtgatctacctgcctcagcttcccaaagtgctgggattacaggcatgagccactgcgccaggcctactgatgctttttgggaagtgttcccaacttggagtcctggtccctgtgtctgatctgcagatgtcttctaccccggcactgggggaacatcttatttttcctgggttaaacattgggatctttataaacctgattatgtcctttccctctaagtctcggttgctttcaggctggcagggttactctgttgggtattccaggaaatgcctgagctccttcaggctcccctagcgttctgttcttattaaacttttcttccccgtctggccggtccttggggaacccactcactattttattttattgaccgggttatccagggatgaagtatgaaactcaaaagatagagtaggttggccaggcatagtgattcatgcttgtagtcccagctgtttgggaggctgagacaggaggatcgcttgagccccagagttcgatgcttcctgagctgtgattgaatcactttactccagcctgggtgacagagtgagaccctgtctccagaatagacaaaagatgcagtggaatccacgtccagaaactgtatgctcactctgggctccagcacccacttcccctccctggaggcagcctgagttttctgtcccctggtatgctgcagatactctccacagaaacaagcagatgcacatgtcaacagttttgcaagtgttgctcttttcccccaccttcttttgacatagctggggcagtttccatctctggtataaggtgccatcttattccatctctggtgtaagagtgtgttgctggatttgagtagttctaagcagcactgcaggagtccccctgttctgctgcatcattttgcacacatatgtgtctgtggaagacatggcccggtggggccccaccttgctgggggagagggatgtgtgtgtgatggtggtgcatgcttcccccttgctactccaggtgtctgccccatcccttcaccctggaggttccagacagcccctcttcaccagcgattccccaactcatctccagctcagatcccacccctgatctccagactcatggccccagctgcctcctgggctccttccccaggatgtgcctcaggggccactaaaggagccagtgcctcccacctgcccggatcgggtgctcctccagggatctttgttccagtgagtggtgccatcacctgcccaacctcatggaccagagcactgccctgtcccaatcacgttctcctatgcaccaccatacctacccctaaagttcttcctggcctcatcccgtcacctctgtctccatggccttggtcccagctcaagcctcgtcctctgccacctggaccatcggcccagcctcctctttggcctcccagcccccaacatccccccctcagtccatccccctaatggagagcttcctgacactagagctgacctcactactcccctgctcacagccctccgcgtggcctctcacctcccccaggatagagtcccaacccatccttctgtgtctcctcctctctgtgtccactgtcctgaccctaactcaatcctcattctctgcctcctggaccctcatcctagcctcgtgacttctggtctaagatgtgagagcacctggcaaggtaaatgctccaggaggggttgctccctcccatttcctgccaccagaaaatgttatcggctgcgtggcattgcgaaagccttcctcttcccagcctagggtttcatgtgggcatttaggtgctcccagtacatagttgcatggcaaacaatcctaaaatatacaagactacatttagtattttgtaaaattctttactaaccccaaattgtctactggaaactataggctcctttttttttggtgggtggggggcaggtgtgtttgtgggatggagtttcacttgtcacccaggctggagtgcagtggctcaattttggctcaatgcaacctccacctcccaggttcaagcaattctcttgcctcagcctcctgagtagctgggattacaaccgtgtgccaccacacccagccaatttttgtatttttagtagagaccgggtttcaccatgttggccaggctggtcttgaactcctgacctcaagcgatccaccttagtctcctaaagtgctgggattacatgtgtgagccaccgcccctggcctctgtaggcttctttaacccatcagagagactccctggtaaggattaggggctaattactggtgcctcttcagctgtcagtccatcctcctttatttgtacccaccttccagtcagcaaggcacaacaatgttgttacaaaggaaacaaactcaatttggcccatttcctggaaatgcaatctcccaaacaggtttgtgtgaaccaaattccattttcctttgtttcccatgtgcagtcccagttgcatttccatgggagccaatccacccacccatagaatgacttgaaaatgtgtgaagttcagaagtttcataccaagaagtttgctgagcatgatgtttgtatattgattaggagtaaaaatgttcatttttacaaaatattacaacttctccctctcccctccttccacccagtatcccctgttcctcccccaggcattctggtcactgttcctttttgttgagatcattctcggtgtctcatatagctgggttgcagctccgttctttgccaggaggtggtaatagaggattccacgcactcagaatgcctcaggccggcgcctgtggcttctctcaatggagggaagtgtcctgcagggggcgctgttggtccttcaggcaaggtcgggttccctcgaagtctctgtcttagcagttgctggtcttcagaaacattgggcaccaattttctcatttctgaaatggaattcaggtgaggtcccctcagtgctgaggtgcttcatgttgtcagaggaagagttgggaagggagcggaatggagcagaaaggcgtcatccgctgctcactgagctcagataggaggccagggatcggcagattcaggagcccactcctggccaaccccaggggccccacccagtcctgtccctgctccttacgtgctgtgtatctttaggcaagttgcttcctgtctctgagcgtcgtctttgtttccgccttcctgggcctacggcaggcctgattcctccaggcagtgtccagagttccggacagatggaaaaggaagagagaatgggtgtcacaaaggtctgtccactcctgggcctcaggcttgggggccctgctcagggctagcctgtttgggcctcggtatggactcctgcctcctggtcaggacctggaaacctgggagcaggcaaggcaggaacaggagagggaggcaaaggcccaccaggcagggatgcaggggccacctggagacggaggagacggggctcccgggagggaggccagtgggagtgagagcttgaaggagagagagccaggagaggagacaggtccagagaggagggaaaggaaaggacagggcagagacagagaaaccagagagagggaaggaagagagacccaagggggagagacagggaaggaagagggaggtgagaagaggaagaggcagattcagaggagagaggagagaaaagaggtggaaatcaaacaggagaaagagggaggagaggagggaggagagagtgtaggaaaaaagcaggaggaaagagccgggcacggtggctcacgcctgtaatcccagcactttgggaggccaaggcaggcagatcacgaggtgaggagatcgagaccgtcctggctaacacggtgaaaccctgtctctactaaaaatacaaaaaaaaaattagcagggcatggtggcaggcgcctgtagtcccagctactcgggaggctgaggcaggagaatggcgtgaaccctggaggcggagcttgcagtgagccgagattgcgccactgcactccagcctgggcgacagagcgagactccgtctcaaaaaaaaaaaaaaaaaaaaaaagaaaagatggccagagcaggaggggagagaggaagagggagaaagaaggaaacagtgtagggggtcagaagtggaaagagaagaaaaaacagaagaggaaagaaagacgagggggtgaaaaaagggacaggaaggaagagagggagagggtgggtgccatggctggtgagctcggagaagagggaagcagagaaacgggtgaaggagggagcgtcctagggagaagtgggtgggggagagggtgttgggggagaagagggtgggggagagggggccccgggagagggagggatggaggagcggggagctccagccagagaagaggaaagagaaaggagagagctaggaactgggaaggaaaagagctaggaggagaccatgagacagaaagagaagagggtgaagagagaggatagtggctgggaggagagaggaggagggaggagcacagagggagaggagaggaaacagccagagaatctgctagaagggagagaggagagagaagagccggacagggagagcagaagtgagaaaaaggagggtggccacagagaggacagcgagaaaaagagaacaggaagaggggaaaagagaagaaatgggagagggaagaagggtgggagagaaaacggaacagagagggggcacagacagcggactggaccgagagggagatggagcggtgcggagggggagagagaaagagggagggaaggagggtaggagagggctggagataggggaaaagagaaaaggagggtaggagagggctggagagagaagggaagttaagaagggaaggagagagacagacattagggaagaaggaaaggagaaaggaaaaaatacaaaaaagggcagagagaaaagaacaggccgggcatggtgcctcgcacctgtggtcccagcactttgagaggctaaggcaggaggatcactggagcctgggaggtggaggctgcactactgcactccagcgggtgagtgagcgagaaaaaaagcagaaaggaaagaagaggtgcatgagtgtggaagagcaatatggagagaaagaagggagagaggattggaagtagcgacagaggaccatgcccctccagctgaggagggggcgcccctaagacagcgtcagcccagagaccggggcaggaagcaggaacgtgaagcaggttaggagccagtgtgaggcacggagagggccgggtagctgggcggcgggggtgtcgtgggcacagcccaggctactgcggggacaggctgccagacccggcgggtccaggttgggaactcggccatgcagcagaaacgttccctgcctcaacagggcgcagccaccccggggccatctctgtgacccagggagagaaaggacaacgaatgggactagacgaggatggggaggaacagagcagctgtggaaggtgcggcagagaagggcccaggagaaaggaggaagggaaggagctggaggggcgggagaacaggagacagaacaggacagagacagctgcccgggaggatgggagaacagaaagagggaggaaacgccgagcactgacctgggggaggggagtaaagagaagtgaagggggattggaagggaactggagaatgagagaagcaacaggcggggtgcgtgtaggagggcgggagagccaatgacaagacagaaaaggcagagaaagcaaagcaagaccagactcctcatccggtaacactgtgtcaggtcattgccctcccaccccgcccccaaccccataactgaaaacaagtaggaacctggataaaatagtcttaacaattttttttttgagacggagtcttgctgtgttgcccaagctagagtgcagtggcgcgatctcggctcactgcaaactccgcctcccgggtttaagcgattctcctgcctcagcctcccaagtagctgggattacaggggcccgccatcgtgcctgctaatttttgtattttttagtagagacggggtttcaccattttggctaggctggtctcgaattcctgacctcatgatccgcccaccttggcctcccaaagtgctgggattacaggcgttgagccaccgtggccggcccttaaaagcatcaaactacatacaagaccgtaaggaagctgtgggtcaacgcggagggacgtgggaacccatcccggtgaagcggcagcgtcacgtcctttctcccagggatctgttggtcggagacatctggactttcatgtggacagcctgagtgacagggggacccaggggcctcacctgggctacctggggtgggtggaccctccactgtgccaaggtgcagcctgggctcggaggaacatgccctccgcctagtccctgacatccttttcacatccaacacgcagagcaggggcgtgagggagcaggcaagcagggaagggaaagacaatgagcaagagccagcgggacggtggggcggatggcagaggcttcgctgctggaaaatcagacgcagagtacgaaacgcctgtgctcactatgttaataataataataaaaggcaaaaaaccaggctcattgatacactgatattaacaagaacaaagtactgagagagagagagagaggtgaggaggaaggcagaagagggaaggctggctttcctgccgtccactttgtgacctcctgcgtgatggcgcgtccttccaagtcatggggtaacgtccttgtggcccagataatgagctgcagacggacgggaatgtgcaactgtggagacacgcgagcttatggtcccaggacctggcaggacatgaaatgagtttcttaaagggtgaaacagattgcaggaccaatcgtcccgatcgtccaaggcaggataaaaatatcccagcatgcggaggagccctccctgcccagtctcctccgaggggcctcggggcctctgcagctgcagctgttggagtcatcaagaagacggggacgcgggagggggacagggaccaggaggcgaggggatggcgggagtcgggggtggggttgggcggggtggggagaaggctgtcagcgccaggctcagacgagccggtgggagcagagacgaggagagggaagggtcaaggacaatgactggcagaggaactggaaaggaaggagcgggcatggagaggcggagctgggaaggacttgggggactagaggcgaggggagagagcttgtggggtgagggagaaaacggagaggaaagagcgagtgaaggtgaggatggaaaggaaacaggaaagccccatggaggggaggatgggagaaatagagtgtgtcagagacagagagggagagagagatggcgagagatggagagagaaagagacagcgagagagacagagacgttgagagaaacagagatagcgagaaagagtgagagaaagagacagggagacagcaagagagacagtgagagagacagtaagagggagaccgagagagagagtgagagacagacagcgagagagagacagtaaaagagagatagccagagagagacagacaatgagacagaaagcgagagacagagagagacagtgagagaaacagacaaaatgatggcgagagagtgagaaagaaagagacagcgagagaaacagagacaatgatggcaagagagtgagagagacagagcgagagagacagagacggactgagaaaatgagacagagacagcgagagatgggagagacagggagagagagagagagagagagagagagagagagagagagagaagcgccaaagagaagccaccaggagcgtgtggaggggaagccaggtggaactcactgaaggtgcagggagaggaaggggaggcaggagtgagaggaaagaggagaggcaaatccaagggacagaaactggaggcaaaggaggcagaggagggagggagaccaagggcacaggccctaaccacagtgctgccccttgtccccggcccccttgtctccttctgacacagtcggttgctgtggacgggcacagtgagactggggccccatcagcgcctcctctgggggttgggtacagacgatgaggaaatgacagggcggggatgaggaggaggacctagcgcaggggaaggagagggcagaagacagtggggggtggcagtctggaggacaagggagaagattccagaaaggctgagagccacaaggtggacaatcaggaaaaggtggggctgggtggaagcgtgtggaggactggaatatcgcccaagggaggagcagtgtgtgcaagacctagagaggaggaaacactgaggatccagccgaagagaggacacacagggacagggacagcctgtgtgtgtgtgtgttatggatagggggaggaggaggggggagaggaaagaggaggaggagaaggaagaaggaggaagaggaaagaggaggaagggggaggaggaggaaagggggaggaggggtgaggaggaggaggaaagaggaggaggaaagaggaaggaggaggagggaggaagaagaggaaagagggagaggaggaggaaagggggaggaggggtgaggaggaggagggaggaggaagaggaaagagggaaaggaggaggaaggaggagggagtaagaggaaggaggaagaaggagaaggaaagatgaggaaggaggaaagaggaggaggtggagtaagagggaggaggaggttgcggtgagctgagatcgctccattgcactccagcctgggcgacagagcgagtccccatctcaaaaaaaaaaaaaaaaaaaaaaaaagggaatttgggggcatgcagagacaggaacagagtgggagcaggggttgggggagagattcagagaatgggagagaggagagggcgagagagacagaggaagggggtcacagaggagaggtagaaggagaatggggaggggcaaatcctctttcccgcccgagcctcagtttcctcatctgctccctcaggtggtgaggagtccagggaccacccgccaagtgtctgcagggcaggaaggcctgcggaggggagagggaggtggaggaaggaggctcaggcttgaatccagtgtggtgactggcagcagaagcgtcccctccatgggcacgggctgcctctcaggctcagattctagagtgttccttcctagagtccctccaggcctccttcagcctcccccaccccaccctgacctgggagggagtagccattgtcgtccacatatttttccaagggagaaatcaggctgcagcccacatcctccttcctcctcctctttcctgcagccccgcacggtgtagctggccaccccttctagggctgtggcggctgaggggaaaggaaggggctaaagagagtcgccttggtacacagttggcgctcaattggtgcccttcccctttcctaggggagagcacagagagtaggaaggcagagagaggaagagaaagggggaatcgagggtgagaaggggaggctgtatctataaaaagcctggcacacagtcggtgctcaataactgcccaggcccttcaggaccacatgaaaagggagaagaagaaagtcccgcagagcaaaagcagaaggagaggcagcctaaagagagggacatagagccaggcacggtggctcacgcctgtaatcccagcactttgggaggcctaggcaggtggattgcctgagctcaggagttcgagaccagcttgggcaacacggtgaaaccccgtctctactaaaatacaaaaaattagccgagcatgttggtgggtgcctgtaatcccagctactcaggaggctgagacaggagaatcgcttgaacccgggaggcagaggttgcagtgagctcagattgcccccctgcactccagcctgggcgacagagcaagactccatctcaaaaaaaaaaaaaaaaaaagagagagaggcacgggtggaaagtgtgaagcagaccagtaggtgtttgttaagtgttatttcttttccccaagagacaggagaaagtaaaggaggagtgaggagaggaggaagaggaggaagagaaggaggaagaggaggaggaaggagaagaggaggaagagaggaggaggaggaggaggaggaggaaactccagcagagagaatagaagagactgttgtgtgggaaggagacaatatatgtaaagtgactaatacacagtgggtgcctaataaatgcccattctcctccctggcagcaagcacagagaaagcagccaggaggaagggagcaagcggagagaaggagaaaaggagagaagggagaacagagcctgtgaggcaagcagacagtgtagatgaagcggcagcatacagtaggcactcaatacatgcctatttcctccctcaggaaagagctggcagggcagagaggagggggagaagctggtggagagaaggaggcagggagaagagaggaaatgagaacaagtacactggtgaggtggtgggcacacaggaggcactcaataaatgcacattgtcgtccttggaggagcaagagaacaagacagaaatgaaggcacagacaggaatgagaggaaaaggttggcccaggaggcctccgtgggggtggaggagcagagggaggagggatcagtgagaggagtgtggcagaggagaggatacgcagggagggggcattgcaggtaaaccatggggcacacaggaggcactcaataaacacctgtacccttccccagaaaaggacccagagaacagcaaggggataagctggcagagcaagaggggcagcgagaaagaggtaggagatgaggagggatgttaattgcctggcatacagtaggtgccccataattgcttgtctttgtccccgagaaagagccgatgggacagaaagaagttagagataagggaagaaggcgaagtgaagggttaggggagaataagaaaactgtctggcacacaataggtactcaataaatgcccattttcttccctggcacagagcagaaagaagcagagactggtggagtcagtggagactgaagggcaagaggagaggagagaaaggacataattgcttgcataccagaagtgctcaataaatgtagtccttgccttggaagagggcagagagctcagaaacacaaggaaaggacagaagagggaccggggaggaagagagtgaggagagaggtatgtaaggtgtttagtacacagtaagtgctcaaaatgtgtccactccctctgccaggagagagcagaaagtcagaaaggagaggacaccaatagagaggaaagaaaggggccaggcgccgtggctcatgtctgtaatcctagcactttgagaggcagaggtgggaggatcgcttgagcccaagagttcgagaccagcctggccaacgtagagagaccctgtctctacaaaaaatacaaaaattaggctgggtgcggtggctcattcctgtaattccagcactttgggagccaaggtgggtggatcacctgaggtcaggagttgaagaccagcctgaccaacatggtgaaaccccgtctctactaaaaatacttaaaaattatccaggcgtggtggcgggtgcctgtaatcccagctactcgggaggctgaggcaggagaatcgcttgaacccaggaggtggaggttgcaatgagctgagatcacgccattgcactccagcctgggcggcaagagcaaaactccatctcaaataataataataatacaaaaattagccaggaatggtggtgtgtggagttccagctacttgggaggctggggtgggaggactgcttgagcccaggaagtcgaggctgcagtgagctgcgattgtgtgcgctccaacctgagcgacggagtgagaccctgtcctagaaagaaaaaaagaaagaaaggaatgggggtggggggaggaaagaaggtagcgagagaggagccatgttcctcaactcctcggcgcatagcagatgctcagtagatgcccgtttccttcccaggagagaccaagcaaatcagaaagagaaaggaactggggcagaagggacaggaaagcaagaaggatggaaagtgcagacgcggttaggggaattgcctgccaagcatcaggtgcttaataattgcccgtttcttccatggaaggagccagaggcacaggaggaacaagtagagggcgccgaggacggcacacccgaggcgggcacacccgaggcgggcacacccgaggacggcacacccgtggcgggagacggagtgtgtgaggagaggcgaggaggcattttgggtgcatacagcaggtactccataaatgcctgtccccttccccaggcagagcagagaaagcaggctgggagtaggtggagaccccaggaagggaggccaggggagaaggagagtctgagggtggaggccgtgggccaggcccgcaggaggtgcaccttccccaacccagcagccgctgtggccgaccctcctccgtggcccagcccacaggcctccccagctggctggctcctccggagccctgacaagggcccattgtcctgggcctggcaccgcctggcctggcctggcctggagggggaggggaggctgtccagccctgaccggctcttgtcccctgtgtctgtttgtgtgtattggagtgggggcgctgtctggtctgtctgtctctgagtctctctgtgtctccctgtctctcacgtgctgtgtctctgtgacctgctgtctctctcatttctgagcttacggcccccatcttgtctctgtctcgctctgtctctctctgtctctttccgtgcctgtctctggttctctctctgcatccatctctgtctctgggagggaggagcccccacccccagctccagaattcccaccccctatacccaggatcagggctggggggccgagctgagaggcagaggagtgaggaaggaaagaaggaggcgcagaagggagagaggtgaggacagaaacagctttattcagcagggaccgcagaggccccggagggcttcgtccagggagctggggagagaggaggagtcagagacaggagagacagacagagatggagagaaatggggggagagacagagacagaaatgggggtagagacagagacagagagaaatggtgggagagaggcagagagaagtgggggacagtcagagatagaaatggggaagagacagagatagaagtgggggagaggcagagacagagagaagtagaggagagacagagatagaagtgggggagagacagagagaagtgggggagagacagagacagagaaatgggggagagacagagatagaggaagtggaggagagacagagagaagtgggggagagacagagacagagagaaatggagagacagagatagaagtgggggagacagagacagagaagtgggggagagacagagagaagtgggggagagacagagatagtgggggagacagagacagagaagtgggggagagagagatagaaatgggggagagacagaagtgggagagagacagagatagaaatggggagagacagagacagagagaagtgggggagagacagagatagaaatgggggagagagacagagagaagtgggggacagacagaggcagagaagtgggggagagtcagaaatagaaatgggggagagacagatagaaatggggagagacagagagaagtggggagagacagagagagaaatgggggagagacagagatagaagtgggggagaaacagagacagagagaagtgggggagagagagacagagaagtgggggagagtcagagatagaagtgggggagagacagagaagtgggggagaggcagagaaagaagtggaggagaggcagagacagaagatggggagagacagagatagaagaagacagagagaaagagacacagagatacaaagccagggagagacagagagatggggagaaaagggagagtaagaaagagaaacagggggtgctgagggagactgagagaaagttggggggaggagacagagacacagaaaagaggtgggaggaagagacagatgagacagatggagagacagagagaaacagacgagaaggaggagagagagatggagagaacgatagggagaatgagagacagagacagtgaggagagggagatgaggcaggagaggagataaagagaactggggagagggacacagagaaagacagatggggagagagacagagacagggagaaagagaaggagagagagacggagagagagaggagagagggagacagcgggaaagagggggagagagagagacggagagagggagacggagagagagagacagagggagagagaaagagggagagagagagtgggagagagagacagagggagagagggagagggagagagaaagagggagagagagagagagggagagagagacagagggagagacggagaaagagagggagagagagacggagagagagagacagggagagagagacagagggagacagggagagagagacacagggagagagagagagagggagagagagagacggagagggagagacggagagagagacagagggagagagagacagagagagggagagagaaggagagagagagagagagggagacagagacagagagagacagagggagagagggagaaagagagagagggagagagagagacggagagagacagagggagagagggagagagagagacggagagagagagacggagagagggagagagagagacggagagagagacagagggagacggagagagagagacggagagagggagagagagacggagagagagacagagggagacggagagagagacagggagagagagagacggagagagagagacagagggagagagggagacagagggagagacagggagagagagagacagagggagagagagagacaggaagagagagacagagggagagagggagacagagggagagacagggagagagagagacagagggagagagagagacagagggagagagagacagggagagagagacagagagagagagggagacagagacggagagagagacagagggagagagggagaaagagagggagagagagacggagagagagagacagagggagacagagagagagacagagggagagagagagagagggagagagagacagagggagagacggagaaagagagggagagagagacggagagagagagacagggagagagagacagggagagagagacagagggagacagggagagagagacacagggagagagagacagagggagagagagagacggagagagagagacggagagagagacagagggagagagagacagagagagggagagagaaggagagagagagagagggagagagagacggagagagacagagggagagagggagagagagagacggagagagagagacggagagagggagagagagagacggagagagagagacagagggagacggagagagagacggagagagagagatggagagagagagacagagggagagacagggagagagagagacagagggagagagggtgacagagggagagggagacagagggagagagagacagagagagagagagggagacagagacggagagagagacagagggagagagggagaaagagagagagagatggagagagagagacagagggagacggagagagagacagagggagagagagagacggagagagagacagggagagagagagacagagggagagagggagacagagggagagagagacagggagagagggagacggagagagagagggagagagagacggagggagacagcgagagaagacgcgcggagccttgcggcaggaggtcgaggaaagaacagcccctctcacctggcgtcggtggcagctgaaccctgggcccgactgtgcgatttaaggggtgccctgggggtgagaccgcccccccacccaactgccttatctggccagacccggctctgtgagctaaatcgggcagcagctgtcaccaccagggggtgtgggacagctgtccccctccccccgcacctgccctgcgcctgcctcttgaccacagcccctccctctccctttctgcagcctgggggtgtggagaggccactggcatctgtgcggggcgccccagccccctcagctctgggacaggcctggccgggtgccctggggcaagcggtagccctctgagtcctgaggcgctcccctgggaagagcagtcccagcgggtgggggcacaggcgctctgcactgtgaggggcagacagtaagtgcttagttgatgcaatgacctggtctgtcctgcccgctctcacctgccagaatatgggggttggggcaggagggagtgggagcaggaggaggtcagctggcccctctccccccacccccagcgcccccagctcctcctcccggggctcctcactccggaccttatttggccatagcccaggacgcacctgggggccacagccccgcctgccactcaggcccaagaatagcaacactcaggcccccgccagtctgtctgggacctgcgatgggacaggcgacaggcacagggtggcagggaggggcccaggggcactgagagaaggggagagacacagacagaggggagagacagcgagctgaggagagactgagagagaccgtgggagagacagagagacagggtcaaagagacagagaggggtggagagaaatgcccagcaagagagatagagaagggaggctgagacaggcgaagcgagagagggagacacagagacagagggggttagccaggggcccggggccagacacccagatggggcagagagcgagacccacaccagcagaggcgtggggagcccggtgggcgggcaggaggtgcagggatctggatgggatggggccagagccgttcgggagtctgcaacccccagcagtttcccctccggtgctgtctggcttttaactttacgacctgccctttgaccttgggaaaacttgcaaaccagaacctgccacaccctggtccatgcgcagccagggctttcatgagtgtgtcctgcggggcatcagctccaccttgccaggggtgcatgggcagcttgtgggctgcctggatgaactgcctgcctgggcgcatgggcctgtggctccaggaggggacacaccccaagccagggaccccttgcctccctgtgcctgagtcccccacttctgcaggtgcctaacggggatccccaggttcatccaggcccctggacaccttccactcattcctgcctcctcacctcccagggcccaccagcctcagaccctcctctctgtcgccctcaggggcctagctcaagccctgcctcgcccctcccagcctcctcccgggcctcctggcttctggttccccctccattctgtgcctgcagccccagaggggtctctgcacccagagctgacctgtccttcccttctcgcagctcccaggctgcccttggaggtcccgcctggttgggttcctggccgggacccaccctcctccttcatcacctcctcaaataactctggcgataaacagccgtggcgttccaggtctcatccgggatgacttccaattctggagtgccctcccgtgccccgccagcctctgcagagccctcctcagccttccgtggccagccttgtctctgggccattttatgcgacttgcttgtcccggggtcccttctctgttctctcgtccctgcagtgctctgtgggaaccccataaaagcccccactgctgggacagaaactcttggtgtccccttgggtctccccacagggtgggagctgggagggtgggccgacacttcccgtcagcacaggcgtccctcctccgctgtggggaccctcgtgatgacccggggcccaccgggggatccaggacactctccctgtcccagtcccactcgcaacctcactctcccttggccaagtaacacaacatattcacaggctccagggattaggacaaggcatcttttaactgtatttattttaattaatttttttttttgaaatggagtttcactcttgttgctgaggctggagttcaatggcgcgatctcagttcactgcaacctccgcctcctgggttcaagcgattctcctgtctcagcctcccaggtagctgggattacaggtacctgccaccatgcctggctaattttttttttttttgagacggtgtctcactctgtcacccagactggagtgcagttggtgcgatctcggctcactgcaacctccgccttgcaggttcaagcaattctcctgcctcagtctcctgagtagctgggattacaggcatgtgccaccacacctggctaatttttgtaattttagtagagatggggttttcaccatgttggccaggatggtctcaatctctttaccttgtgatccacccacctcagcctcccaaagtgctaggattataagcgtgagccactgcacctggcctaattttttgtttgtttgtttgagatggagcctcactctgtcacccaggctggagtgcagtggcacgatctccactcactgcaagctccgccttctggattcacgccattctgcgtcagcctccccagtagctgagactacaggcgcctgccaccatgcctggctaatttttttgtatttttagtagagacggggtttcaccgtgttagccaggatggtctcagtcttctgacctcatgatccgcccgcctcggcctcccaaagtgctgagattacaggcgtgagccaccgtgcctggtctattatatttatttttatttatttttttgagacagggtctcactctgtcacccagggtggagtgcagtgattcgatcatgggtcactacagcctcgacctcctgagctcaagtgatcctcctgcttttgcctcccaaagtgctagggttacaggtgtgagccaccatgcctgggctattatattttgagacaaagtctctcttactcacgatcatggctaactgcagccttaacctcctgggctcaagcagtccttctgcctcagcttcccaagtagctgtgattacaggcgcaggccaccacgtcccacttatttatttatttatgagacagagtcttcctctgttgccaaagctggagtgcagtggtgcaatctcggctcaccaaaacctccacctcctgggttcaagtgattctcctgcttcagcctcccgagcagctggaattacaggcgtgcaccaccacacctggctaatttttgtaattttagtagagatggggttttcaccatgttggccaggctggtctcgatccctttacctcgtgatccacccacctcggcctcccaaagtactgggattataggcgtgagccacggcacctggcctattattattattattattatttttgagacggagtttcactctgtcacctaggctggagtgcagtggcacgatcttggttcactgcaagctctgccttctggattcacgccattctcctgcctcagcctccccagtagctgaaactacaggtgcccaccaccacgcccagcgaatttttttgtatttttagtagagacggggtttcaccatgttagccaggatggtctcaatctcctgacctcgcgatctgcccgccttggcctcccaaagtgctgggattacaggcgtgagccaccgtgcctggtctattatatttatttttatttatttttttgagacagggtctcactctgtcacccagggtggagtgcagtgattcgatcatggcttactacagcctcgacctcctggcctcaagtgatcctcctgcctccaccccccaagtagctgggatcacaggtgtgcaccaccatgcttagcttattttaaaattttttgtagagacggggtctcactatgttgcccaggctggtttcaaactcctgagctcaagtgatactcctgcttttgcctcccaaagtgctagggttacaggtgtaagccaccatgcctgggctattatatttttgagacaagatctctcttactcacgatcatggctaactgcagccttaacctcctgggctcaagcaatcctcctgcctcagcttcccaagtagctgcgattataggtgctggccaccatgtcccgcttatttatttatgagacagagtcttcctctgttgccgaggctgaagtgcagtggtgcgatcttggctcaccaaaacctccatctcctgggttcaagcgattctcctgcctcagcctcctgagtagctgggattacaggcacccgccactacaaccagctaatttttgtatttttagtggagatggggtttcaccatgttggccaggctggtcttgaactctttttttttttttttttgagacagagtctcgctctgttgcccaggctggagtgcagtggcacaatgttggctcactgcaagctctgcctcccggattcatgccattctcctgcctcagcctcccaagtagctgggactacaggtgcccgccaccatgcctggctaatttttttgtatttttagtagagacggggtttcaccgtgttagccaggatggtctcgatctcctgacctcgtgatctgcctgcctcagcctcccaaagtgttgggattacagccatgagccaccgcgcctggccagtcttgaactcttgacctcgggtgatctacccgcctcggccttccagagtgctgagattacaggcgtgagccaccagcctcacatgccacttattttaattttttttttttttagagacagggtcttgctatgttgcccaggctggtctcatacttgtggacctcagcctcccaaagcactgtgattacaggcatgaggcaccacatctggccagggtgtggacatctttggggccactgttctgcccgcctgccaatcaacggaatagaatcgagagtcaagaagtaaactcaggcatggtggctcacacctataatcccagcactttgggaagcagaggcaggcagattgcttgaggtcaggagttcaagaccagcctgggcaacaaagcgagatcccatctctacaaaaaaatttaaagaaagtagtcaggtatggtggcatgcacccgtggtcccagctacttgggaggctgaggtgggagggtcgcttgagcccaggagttcaaggctacagtgagctgtgattgacccactgcactccagcctgggtgacagagtgagacccctgtctcaatcaatcaatcaaataaagaagtaaacacctgctttctccttagcaatgacccccgtggaacccaggagatcaaactcatttgtttgccactggtctctctccagcaccggaggagcgtgagccccagggggcacggacttgtgtttttttctgctgtgtcactgatgaggaaactgaggcccagcagtgagaaactggcatgaggtggcagagaaccaggaggcctcctgggctctcggccccacacaccagggtgtctggcctgtaaggtaagtgggagtcactgagtggaaggggccccagaagggtggggccgtcagacacaggccaggcaggcagcaaatcagcagatttattgaggcagcagcggcagtggggagcaggggtgtggggagggggcggggcctccccagggtccatgaagtgctggcctttcccaggcatgcagtgtgcgcagccggagggggatgcgcagggactgcgctgtgggcgccgatggtcagccatggtcagtctgtccgcagccagctgcccttctcctccacctccttggtcactaccagcagcacctcgcacaggccctgggccagcgcagccgccaggaaggccctgggtgggagaaatggggagactgaggctcggccagcctgggcattccgtctggggagtggggtttcaggcccctggtcttggaatcgcctctgtggggctcacctgactccgtcctcatcccccagggcctcgggcgcccgcagcttggagtccaggttgtagtagacaccgtccacctggcgcagggccacccagtgccgccggcgcagcggcagtgacagcagccccagcgacacgggcgagggcaggttcaggatcagccccagtacctggggcagggccagctgggacaggggcctgtgtgggcagggaggggacactgccatcagggcctgctccgcccgccggtgaaatgttgctgaacatgtggggcccaggctggtggtggtgagggcctcctgagcccacccagaggtgttccttaatcagccaccctggttcccgacactcatccgttcacctgcccactcaaacctcccacccatgcggccacccaaccagacctcccacccacccacccaccgtccacccacccacccaccgtccacccaactcacatcggcccttcaccaaccaccatcaccctgtctgtccagccacccacccaccaacttaccaactcctcacacagccacccaggatccatgcatgatccgcccaccccactgagcctcccagccaccagccaacttcccaatgacgattcacacactcacctcccatctatgcattcacttccatccctcatatacacccgccccacctccccgtcaaccacccaaccaccatcaccatccaactagccatctactgttcaccacccaccacccacccacccacccacacagccggccaccacccagccagccattcacccaacagtggactcgccatgcccccaatcctcactcactcttgacccccctgccattggtctacccctcatccaccagccacatgcccagccactggccagccggccatcaaaacttcccattcatccacccaactccccagcctcctgtctgctgcccattgcccaggaacacccatcacttcactccccctgacccaacacatccaacggcctactcagcattcacccagtaaccatcatccacccagcatctcagcccatcgaccacctgatctccccctttcaacccatcagtgccaggcttcccacattcatgccaacctcccccagccacattcccctccctgccccccaacaggctcacactatagggtgccctctgtgcccggcccagcacatgctgtgctgctctggggcctacctcctcctgtcccaccacacggcggccaggcccagcccctgcagagcggccatgatcacattgacatcatagttgccggtgcccaggaggctgcgatgagggttcagccgggagtctggggccaacctggtagtgggggtggccagagctgaggtggggacccctggaaaggcctccccacaaaatgggggtcccaggggccacaagttgcctcagcctttgactctccccgcttcagaccccacaactcatccacccccaagtcctgcctctcctgccccaattctgccctgtccccaagtcctgtctctcctgccctgactctgccctgtccccaagtcctgcctctcctgccccgactctgccctgtccccaagtcctgcctctcctgccccaactctgccctgtccccaagtcctgtctctcctgccctgactctgccctgtccccaagtcctgtctctcctgccctgactctgccctgtccccaaggccccagatgggctctgtcttctcccgcagcctccagcctccctccagtccattcccacacggccctggccctctcctgctctcagctctcccatggctccccaatgccttggacaaagtccctgtccctccgccagtcccttcctctgtccttcaaggcccacctcagatgtcacgtcctctgagaggagcctcctgacctccaggctggatcggggccctgtctgggctcccccagtgaactgagccacctcaacgatgacagctgcccgcatcaccctgatttaacactgcttgcttctcccacggggttgccctcacccctcccctgctcacagcccactctgctgcctcatttcccccaggacagagtcccacaaggccctgcgtggtctggctctggtggcctcacctcagagcctcagcaccctccttcctggtcccctgtccccagccacatccccggtgcccaccgcctcccgccccacccccgccaacctttcctccagctcttcccctgcctaggaaggctcttccgcctgtcaccacttgtctctgggccctgcctctgaacagctgcacctctgttccctatctggaccctgggcaggcaggacatgggaggaaaacgctcgtgtgtgtgtgtgtgtgtgtgtgtgtgtgtgtgtgtgtgtgtttccctcaccacccttaggctggcacttgtgtctgagtcatctcagggtctccagcatggcttttgtatgaaagagctgatgggtccttgttgcgaatgatagaggagatgactaaataccataataatcagtctgaggggctgggactcttaagatgtccgagagccggaggaggcttggagcaagaggcaggggaggcagggccatctccaggtgtagaaagactctctaggatcaagtggggactgaaggcagggacagactggaggccatgggcaggctgggcaggagagggtcaggcctgagctggggccagggacatggggacagagaggagggagtgagagatggtaaaggagtgattttttttttttttttttttgagacagtcttgctctgttgcccggctcactgaaacctctgtctcccagcttcaagcaattctcccaccttagcctccagagtagctgggactacagacatgtgccaccacgcccagctaattttattttttatttatttttattttttagtagagacggggtttcgccctgttggccaggctggtctggaattcctgacctcaagtgatccacccgcctcagcctcccaaagtgttgggattacaggtgtgagccactgcgcccggccaaagagtgatgttggacattgtgaatagtgaagaggaacattccatgctggcagagaaggaagccatgccgggcagaaagaagtacctggaagcccagaggccgcacagaagggctcacgggagtggagagtctggtttgaggggggccgtgagggctgaagatgcggaggcaggctcggcctccgctatgaggagggccctgagtagggcgggggcgtgtttaggatggactggagagctgtgacagggcccagataagagatgcctgaagctgggtgagcctgtaatcccagctactggggaggctgaggtgggaggatcacttaagctcaggagttcaagaccagccagaccttgtctctaaagaaagaaccactgggccgggtgcagtggctcacgcctgtaatcctagcactttgggaggccgaggcgggtggatcacgaggtcaggagattgagaccatcccggctaacatggtgaaaccccgtctctactaaaaatacaaaaaattagccgggcgtggtggcgggtgcctgtagtcccagctactcgggaggctgaggcaggagaatggcatgaacccgggaggccgagctcgcagtgagcgagatcgcgcaactgcactccagcctgggcaacagagtgagactcagtctcaaaaaaaaaaaaaaaagaaagaaccactggattgaggtctggctggggctgaggccacagggacagacaggcacaggaggcaacatctccccagagtcccagcgtctagcttaggcaagtgagcgcggagcagaagaaagcccccaaggctcagcgcctgcctggcggcgagacccaggtgggtcactccgccagagctctgctgctccaggggctggggtgggtgacggtcacctcttgcagatctcatcggcagcctcctggctaaagagctgctgctgcagaacgttgttgagggcgtggacagcacacagctccaggcgctgccgttcgtggtacacggtgggtgggctcggctgtgctcccggggcctgggacatgccgtcctcggctcctgctgggggttgggagggggagaaggtcctcaggggcccgggatctagaggtccagcctcccagcaggcctttggggcatcgccattgattgagctgggactcggagcagcccaggaagacactgggcccctgaccccgctccctggcagtctcctggcagcacacgtccctccatcccttattcctattcctacgaaaaacgctgtctcttctgctcccctagcaacagaaaaccaccctcaccaggtctctaagtaaaagggtccctatcatggtcacctagcaacagaggaacctgcctccccgtccctaggtaaccagggcgctctgtggttacctagcaacaaagccccctccccaccgcactaggtaacaaagtctgtcctccgagcacctagcaatagagaatcctcctcccctgtctctaggtgatagggtcccctctggtctcctagcaacagaagactccccttccccggtcatgtagcagcgaggctctctgctcttgtcacctggcaacggggccccctccccagtcactaagcaacaggagttcctcttcctatcacccagcaaccaggccccctccccggacaccaaggaatggagcccttcgccgacccgcaccccagccacggcgctcgccctttgcctggcaacgcccctcaccccgcctgcctctccgctccaccgagccaggggtttccgcatccccttcctgggcggcggctctgggctccgagtgcggggcgggcaacaccgcgctgactgggcaggcgggacggactacagctcccggtgatccccgcgcgccggactacgactcccgtggggccccgcgggactcctgctccacacggaacgcccgggccgcgtggccctgaagtcggccgtcgggcctaggaaatgccgcactacaacttccgtcgggctccgcggcaggtcccggaagtgcgcctcagaggcccttctttcgcatacggccgcgcccactactgctcagagattctaggaaacttagtaggtaggctctcgcgatagcttcctggcgccgcgctctcatgggtgctcgcccccggcgatggcgtcatgcgcggtgcgcagacgcagcgtgacgtcacacaagggaaagggatcagagacgccaggcggtgcggggggaggcagcggtgatctttactgagtcagaagggagaccctggggaagtggggcagggcaggggtgggatggtggtggtgagaggccaggcagatgatcttgtctcgggagggaggaggcttctcagcagagatggatccccggcctggaggggagctggcagcaggctgcggggagaggggaatgagcgaatgagacagaggagagatgaggagacagacgcctgggggaggcagtggtgggaggaggggacagggcaggggggcggtggaggaagacccggagagagcgggacagagccctgggggtggacagagacagagagagtctcgatcagaggcgggcacaaatggagacatctacagtgccaggattcaaagtcatggagagaggttaaggaaataaaggtcagaaagaaagaaaggtcaacaaatacagaaccagaactgcagaactagtgagagcccgggacccccaagctctgcagaacacaggagcccagggccgggggagaggggcctggccgcacccaggaggctctgccagaaggccgtgacggtggcggagccggtgaccgcgcctggctcggcagggttctctctgcgggtgtgcacagcaaagcttcggcccgtggggccccggggtccgctcagctctacatccaccacgtgcatgtccgtgaggctgggacaagaggggcagtcagtctggagagcctggactcagcccaacaccctgcttagctctgctcacctggtatcagccacgagcaccccaatcaccccatcgaagcccaggctgggggcagccagggcagccgccgccatggtgttggaatttcgcggggcaaaggggcagagcccacggacagggccttcgtagagcacagtgcaaggcccagggctgtgggctgcagccaggggtccctcaagccggaagccatcggggtgtgtggccatggtgacacgaaggctctggaagcaagagcccgggttagggggagtggggtctttgcaggcctcccctggttcctggggagcccagcaggcctcacccggaggcccccagctgcatccaatctcctgatgtcctcagcgccccacagggcccctcgggccacaaacacggcgtggtcccagtgctgtgaggcctccaagagctgccgctctgtggtctggtcacttagagctgagggggaccccacctggggtggatgaaggaggggagggttgaggtcagggaaggatatccacttcagggtggggtgagaccaagacagaaggggcagggctctgcgtaaatggttggggtggggcttaccaggagattggcatggcgcaggatttgtgccccagattcatggattattttgggatgggccacttccacaaccagatcagggcgcctgggagaggggaaagagggcggagggtcttggagaggtattaggcctcttctccccaaggttccctccgagtctactgagggctgcccttcttctccctgacctgggaggcgaaatgagatgaatgggttcgtcctgtttcacatttgcttgaaccaaggcccagagagggtcagggaacccctgagatcacacagtggctaagagagccaggacaggagcttcagggagctccactctcccatggcaaggtcactgacctttccccaagggcagcaaggttctggagctgcagggaagggggcacgctccctgccattcgtcctgggtcacgattccagacaaaaacaagttctaggccaagttctggtccctgagccaagaggcgggagacgagggactgtcctggggagagggaaaggagagggctagagatccagagagagggggacagagacccagagagagaggaggtggggacagagacccagagagagaggaggtggggacagactcagattgcggggtagggagacagagatgggggcagggcagagacacagtggggtggacagaggcccagagagaagggagacagagacggagaggacagagacctggggtgggggtgcagtgggcagacccagagacacagccaggggcagatagagagagaaaaaagtgtttgtggagggcagagagtcttgggagctttaggaaggggtttggggaaggaggccaaggatggtcagggactcaccgaggcggccatagcccaccacgcccaccctccacgggcccctgtcggccatggccctgagtgcggtgtctggggcctggctccctgggctgctcgctgcccgctgcacaaggcctgggcagccgctgctctttggacatctgacccttgagcctctgggctcagtcttcccccttccccgcaggcccagcgtgggggcgtgggcctgcgggagtggaggcgggagaacccttccctgtgctctgtccactttcccgggtccagcacagtgagcatggtgaccgggggttctgggaaccctgcgtgcccccctttcccctgcagcacaccctctttctccctgctgatgtggaaagtttcctctgcagtcccctgccccctctctggccggccaggttgtcatggaaactgcatcttgctttgggttgggagaagagatggtgacagggactctgggctctgtctgtcccctcgtgctcacctctcctccttgtcctcaggcggctaaggtctgagggaggcttcagcctggccgtggccctagccctcccagaggcagcgggagccctggttgtggcttctcctcaatgtgcccttgcctcagcgggtccaacctccctagccccgctgcgcagcacgggtccccttcccacagcctccgcccctgtccacagcctccctccgctctgatcatccttcagttcaccttgacttgctacctttcactctgtcccccatcgtgccaccagctgcctccagtgtgacgttctcgctcccacgtccgtccctcccgttccccagctcgcgtcagcccaggagaagccttcgaggcctggagaggccaagtgcccccaacatgagccccagcctctgtgccttgagggtgcctggcatcggaaatggcgcaggctgcggcagcgcaggctccctgcccccagccaccacctggtacccgctgcagtgtttccatggcaaccaggattggcgctggaaggaggctggagagaaagagagcgtgaacgggagcatggggtggggggggcgggcactgggtggcgagagccccaagttgacgggaggagagaggagacagacgcgggcagacagagaggggccaagaccccgacgtggcacccaaaggctgccgctgctgataagggaggaattggcttccagagccaggagcccccggtgtgggagagatgagatgcctgggtgtagacagagccaggaagggggcaggggccaggcacctcacggaagtggggggcctcccgccatctctaccttctgactcctgctggggcctgagtgtccccatagtgcccatagctgccgtgtacggggtacagcctgggccactacgaggggagaagggggctgggcgcaggcctgtgtgtcctcagggctgtgtccccgaagccacctcagcgtgggaaagcactggaaggccctgcatggctccgtccctccctctgcctcccccagcagcgtgagatggcagccctggccagccccagccctccagggcctgcaactcgggcaccttgaccccccaagagacatcaccaccccctcccccaacccacccaacagctgcccactgtgccagcaaccccccagccaggcccgctcagggtttgctccctgccctcccagggctctgctcctgcccttctgagtggcactgtggtgcccctgccgccccaggcccacccgatccggccctccagcctcccactgaaccggccagaaatacagctgctgtgccccagaggccgcaggcccagcctcccgcttggcctccctccccttcggcaccccgtcctctggagcagccttgagggggtctgcagtggagagacacactctggattgggccctgttgtgggttgaattgtcacccagaaagggaagcgcagaagtcctgacctccagggcctcagaatgggaccttatttgggaattgggtttttgccaaggatggagctgaggttatactggaggtggaggctcctggtccagtctgacctctgtccttgtaagaggggaggttaggcaggctgcagtggcccacacctatagtcccgacactttgggaggctgaggcaggtggatcacttgaggtcagaagttcgagaccagcctggccaacatggtgaaaccccgtctctactaaaaatacaaaaattagctgggtgtggtggtagtcgcgtgtaatcctagctactcagggggctgagggaggagattcgcttgaacctgggaggcagaggcttcagtgagctgaaattgtgccactgcactccagcctggacaacagagcaagactctgtctcaaaaacaaagaaacaaacaaagaaaacggtcaggcgcggtggctcatgcctgtaatccgagcactttgagaggctgaggtgagtggatcacctgaggttaggagttcgaaaccagcctggccaatgtggtgaaaccccatctctactaaaaatacaaaaattagccaggcctggtggcgcatgcctgtgatcccagttacttgggaggctgaggcaggagaatcacttgaagctgggaagcagaggttgcagtgagctgagatcacaccattgcactccagcctgggcgacaagaataaaactccatctcaattaaaaaataaataaataaaagagggggagttggacacagacggacgcacacagagggaagagatgagaggctacaggggcaggcactggaagactggggtgatgtgatacagccaccagccaggacagcctggggacaccagaagctggcgaggcaggaagctcccctgaggtatccccaggtttcagagagagcgtggccctccctccagcctccagaactgtgggacgatagatttcctttgttataagtctccacctgggtttgggtgtggtgtggcggtgctgggggaggagtttaggaagaaagggaatcagaccttctctggggtctccagggtgaaggctgaggggcctaagaccacccggaggtgccccgtgcccaccctcccgacggagctgcgaggctggctctccagcctctccttccgcccccacccacattcactttgttttctctcctccgtgctttcatgaccaaaaaaaatatttttttactttttccatgttttttttttaaagtaattacagagcaggtagtcgttgacgcaaacctcccttcagtatcaaaagtgtctgtggggcaggtggggctggggcgggtggaggctcccccccgcgccgacgacagggaccgccggccgggagcagagccgggcgctgggacgggagctctggcgacgtgtccatctcttcagttttgagggcggaggagtgggagggagggacgggcgtcaaactgcaaaaactgaaccgtaaaaggaaggtgtttggggccgaggggaaaggacacccctggagaaagctcctctctcccctggaaggcggcgggcccggaacgcttggtgggagagcgaggaggaaacgcggagaactcaggccacttctcctgggtcccacgtcccctcccgtcaccggggattggcgggggtgaggcgaggatcccagagactccgctcctggagccccaccctgtccttactgggggtccgagccccagatggggctggaagccacctctccccaattccctgcgtggtcccagaaggtgggctgggctgtgggagggaggggtcccggtcaggctgcgcccgggctgggacctgggtggggggctccacgcccctcgcccgcccggccccgccgcctcagatctgcgtctcttgcacgttctccttggagccgctcttgaagagcagaggttcgtggatggagttgaggccaggcgggcctttgcccccgcagcccccgccgctggggttgctgctgtagtgcgccttgaaggcggcagccacgtagtggtggtggttgaggtggtctcgctccagggcgggcagggccaggtggctgtccccgcccacaccacccccactggccacggcggccgcggcggccacggacacggccgaggcggcgggcagctcgtcctccacgttgatgatctccacggtgcgcgtgggcccgtggtgcttgtggagctggtgctgcttgcgcagcttgtagaaggccacgagcatcaccgcggccatgaacgtgatggccacgaagcagccgatgatgattttggtggtcttcatgacgtcgtccaggtccttgagggcgttctccgtcacatccgtgatgggcaccgtgaacgccttctccgtgggccgcgaggagcgcggggcgggtgccgtggtagaagacgaggcagggccggccgcgtccccaggccggcccccaccccagacaccgtctgtcgtgggccctggcggttccttctccgtcccccgcggctgcagggcctcctctccgggctgcgtctccagggtctccacggtcaccgtggtgaagtaggtgtagccgccactgccccctccaacaccaccactgcccccagggccgcccccgccgctgccggtgcccccggccgccacggggtccacggccgagacgttgagcgtggccgaggcggtggtgttgccggctgagttcgtcaccatgcacgtgtactggcccgtgtcctgcacggtgacgttggtgaagttaagcgtgccgtcatgcaggacggagatgcgcacgcggtaggagccgtgggtcatgagggtgccgttgggcgtcagccagttgacggaggtcatggaggtgcccgtgcggcatttgagctcggcagccatgccctcggtgacgttgaggtccgtgggcggctccacgatgacgggcgcatagcaggtgaaatgcgactggtccagctccccaatgtagcgccccttgaggccggcgggcgcatgacagcgggcgcagcacgtcgtgttgctgggcaccgtctccttgagccaccagctcagccagagcacgtcgcagttgcaatgccaggggttgtggttgaggtgcacgcgctcgaggcggtgcaggggcgtgaagaggtcgtggggcagcgacatcaggttgttgtgggacaggttgagctcctccagcgacttgaggtcgtcgaaggcgttgcgctcgatggtggctacctgggcgtgcatgagccacagcttgcgcaggctggtgagaccctggaaggagcccgggcggatcaggtccagccggttgcccgacagctccagctcctccaggcgcaccagggccgtcaggttggggatgtccttgaggttgcacatgcccaggttgaggtagcgcaggttgaccagcccctcgaaggccgcctccgagatgtattccagccgcttgagctcgcccaggtccaggcgccgcagcgagggcacgcggttgaaggcgtaggaggggatgctctcgatggggttgttccgcagccagagctcccgcagcttggacaggtactcgaaggcctgcgtgggcaccgtggtcagccggttgtcaaaaagctccagcgtgttgaggctgggcagcccgttgaaggcgcccacctcgatcttgcgcaccaggttcttgctcagctgcagaatctccaggtgccgcaggtgcttgaacgtgtccgtccggatcacctggggagagggagacacggatcagtcacggagatactgacggggaccgtggggggatcaccaaggtcccgggcgcaggtggggccgtgtggctggatctcccgtgctgtgctgtgacggtacgacctatattgcaacatggtttgatgagtttcttataaagttaaaactggagtcaaggctgggtgtggtggctcacgcctgtaatctcagcactttgggaggccgaggcaggtggatcacttgaggtcaggagtttgagaccagcctggacaacatggtgaaaccctgtctctactaaaaatacaaaaattagccaggtgtggtggtgcgtgtaatcccagctactcgggaggctgaggcacgagaatcacttgaacccaggaggcggagtctgcagtgagtcgagatagtgccactgcactcctgcctgggcaacagagcaagactccatgtagaaacaaacaaaaaaactggattcaagaattttgggggaccaagcacaggggtggctcatgcctgtaatcccagcactttgggaggctgaggtgggcagatcacttgaacccaggagatcaagatcagactgggcatcagaacatagaccccatctctacaaaaataaaataaaataaaataaattagccaggcgtggtggcatgtgcctgttgtcccagctactagggaggctgaggtgggaggattgcgtgagcctggaaagtgaaggctgcagtgagccctgatcacgccactgcactccagcctgggcaatgaagtaataccctgtcaaaaaaaaaaaaaaaaaaaaaaaaaaaaaaaaaaaaaaaaaaaagaagaaaagaaaagaaaaatgaacaaacaagaaaatgaaaaaaagagaaaaaaagatagttacttagaaagttaaaactggagtcaagaattttggggacggccaggcatggtggctaatgcctgtaatgccagcactttgggaggctgcagtgggtggatcacctgaggtcaggagttcgagaccagcctggccaacatggtgaaaccccgtctctactaaaaatacaaaaattagccaggcgtggtggcacatgcctgtaatcccagctacttgggaggctgaggcagaagaatcacttgaacctgggaggcagaggttgcagtgaactgagattgtgtcaccacactccagcctgggtgacagagtgagactccgtctcgaaaaaaaaaaaaaagaattttgggggccaggcacagtggcttatgcctgtaatcccagcactttgggaggccaaggtgagaggatcacctgagcgcagaagcttgagaccagtctgggcaacattgggagaccctgtctctacaaaaagaatttaaaaagaaatataaaaccaagaattttgggattgaagaggaaaaaacttttgaaaaaaaagttaaaactggagtggccatccgacccggctgttccattcctgggtatttcctcaagagaaatgaaggcagatgtccacgcaacggcttctatgtgggtgttcacagcatttttttctcaggactgcctaagctggagacatcccaaatgttcctcagcaggtgaatggacaaacactgcgaggtgtggccgtgtaaaggatgctgcggctcagccatgaaagggacctggctgctgtgaccccctggatgaatctctcagctcagccatgaaagggacctggctactgatgaccctctggatgaatctctagggggttacactgagcaaaagacgccgaacacaaaggagccggtgcggtggatccgtccacaccatgctctgggtgttctaagtgtgcgtctctgcgtgtgtgggcaggtgaggtatctggggcagacagggaagggcatgagagagctttctggggtgattgaaaggtgctacattggcgtggtggttacatgacggaaagcgactgttaggactccccaaactacacttaaaatgaggatattttattccatgccagtgatacattattttattttattttatttttgagacagagtcttgctctgtcacccaggctggagtgcagttgcacaatctcggctcactgtaacctccgccttccaggttctagcgattctcctgcctcagtctcccaagtagctgggattacagggtcgtgccaccacgcctggctaatttttgtatttttagtagagatggggtttcaccatgttggccaggctggtcttgaactcctgacctcgtgatccacccgcctcagcctcccaaagtgctgggattacaggcgtgagccaccgtgcccagccaattttgtatttttagtagagacggggtttccccatgttggccagactgttcttgaactcccaatctgaagtgatctgcctgccttggcctcccaaagtgctgggaaattacaggcgtgaaccaccgtgcccggccactatacatagttttaaaaatgaaaaaaataaggctgggcatggtggctcacagcagtaatcccagcactttgggaggccgaggtgggaggatcacttgagctcgggaattgaagacaatcctggtcaacaaagcaagacccctgtctctacagacaaatacgaaaattagccctgtgtgatggcatgcacctgtggtcccagctactcagaaggctaagatgggaggatcgcctgagcccaggaggccaaggctgcagtgaactgtgatcgtgccactgagctccagcctgcgtgacagagggagatcccgtccccaaaataaataaataaatatacaaaatgaaaatagtaataccagcaactaagacacattgaacacatctttggtgccagacactgttctaaacattttgtgggtaataactcttttaatcctccaaactgccctgtgagatgggcactattaccagtccttattcgatacctgcaattccaaaattcttaaggccctaacaatcagatttttccaaactttgacaccaaatcccacttggtggcaaaacccgatcagaactcatgtgaagctattttatttattatttatttatttatttatttatttatttattttgagatggagtctcgctctgtcgcccagcctggagtgcagaggcgtgatctcggctcactgcaacctctgcctgccgggttcaagtgattctcctgcctcagcctcacaagtagctgggattacaggcacgcatcaacacgcttggctaattttttgtatttttagtagagacagggttttgccatgttggccaggctggtctcgaactcctggcctcaggtgatccacccgccttggccttccaaagtgctgggattaccggcgtgagccacctcacccagccacatgaaagtaaagcttttattgatcccactcgtgactatccaaacatttcattctagaaattcccatgtttcaagaccactaagatattataaaacctatactatctattactatgtttctaatatcggaatgtcaaaacgcatcagacctcaagagtttcacacgaaggatgatgaattaggcccagggaggtgcagtgacttgcccaaggtcacacagaagtggacagcagagttgggactggatccaggccctctggttccagagtcctggctcttgacctctgaccctggctgccgcctctcagggctggagctggggtccacgggaggggcagtgctgggtcagagcacgggaggcaggagctcacagggtcctcactactgatgaccacgccgggtgcactgaggcccagaaggccacacagccattggatcatatctgcaaagcccagatagtggtgtgtgccagggagaaggggacggacactgggggaatgcggtgttacagtattaacggaggaaactgagaacctcagatgcatcctgtgtcatcacaaagaagctgaagaattaggtatcagagtatatgcaccaaaagaaaaaagagaaaaagaggccgggcgtggtggctcacacctgtaatcccagcacttaggtaggccgaggcgggcagatcagttgaggttgggagtttgagaccagcctggccaacatgataaaactccgtctctgctaaaaatacaaaaattagccgggggtggtggggggtgcctgtaatcccagttactcgggagactgaggcaagagggaggcggaggttgcagtgagccgagatcgcgccactgcactctggcctgggcaacacagtgagactccatcttaaaaacaaaaaagaggccgggcatggtggctcatgcctgtaatcctagcactctgagaggccaaggcaggtggatcacctgggtcaggatttcgagaccagcttggccaacatggcgaaaccccatctctactaaaaatacaaaaaattagtcaggcatggtggcaggtgcctgtaatcccagctacttgggaggctgaggcaggagaatctcttgaacccgggaggcggaggttgcagtgagccaagatcgcccagttgcactccagcctgggtgacagagtgagactctgtctaaaaaaaaaaaaaaactggaaggacatactccaagcttttcttagtagtgaactttatctgttgggaattatggacaatttttattcttgtgtgatattttttcctcaatgaggaaaaattacttttacagtaagcaggaataaaaacaaaaccaaacccagatatacctgagaggcaaacagcgtaagaaatggtagaatctgtggcataggcagaatcataaaataataataatgtatgtcggtgctgtccaatagaaatagaatgtgaacacgtgtgtaatgtttgtttggttgttttgttttaagacagagtcttgctgtgtcacccaggctggagtgcagtggcgcagtctcggctcactgcagccttgaccgtctgggctcaagtgatctgctcgcctcagcctcctgagtagctgggactacaggcacgtgccagcacacctggctaattttattttattttaattttttgtagagatggggtctccctatgttgcccaggctggtctcaaactcctggcctcaagcgatcctcccgtctcagcctcccaaagtgctgggattataggtgtgagccaccacacccagcccacatgtgtaattttaaatttcctagaagccacattgaaataataataaagaaaaaaccaaacaggtgaaatcaactttactaatatatttatttagctcaacaggtccaaaatactctcatttgaacctgtcatcagatgcaaacttgcgattgagccattttacactctttatggtggagcttcgaaatccaaggaaacccaacatgtgttttacacccagggcgtccagggcacctctcagtagcaacgcatgcagtccccgagcccagccagcagccccgatgctggcggctgccctgtgagatgctgcgggtttactcggtgcccagggacgctctgtggacacagtcaccttttgtccatccagcagccctaagaacaaggactgtgatcgccccgttttagaaaggaggaaacaggagcctaaagaagtggcttgctccatggcagagctgggcagggctggccggagcctgcgcccctccccgtctcgctcggccacctcacacccacccatcgccgttccccgtggacagacacggaaacagaggtcacgggtgtagtgtgaagagcagagccctgttcaaatcccgcctcccccgtcctggttgtagggcctgtcacttgagctctctgtacctctgggctcactcttaccacgaggaggatgatgaaaagcacttcagagggtgagggagaggagatgaggtcccagtgttcaggggtgctcagcacgtcgtcattctcattgttatcgttatcgttggcgttgagaaacttgtaccatgcccttgggattacagccctgagccgtccactgaaaggcggctcttagggccaagaaccgtacttttttttttttttttgagagggagttttgctcttgttgcctaggctggagtgcaatggcgtaatcttggctcactgcaacctccacctcccgggttcaagtgattctcctgcctcagcctcccaagtagctaggattacaggcgtcctccaccacacccggctaatttttgtattttttttttttttttttagtagagacgagggttttatcatgttggccaggctggtcttgaactcctgacctcaggtgatctgcccaactcggcctcccaaagtgccgggattacacacgtgagccaccctccccggcaagaactgtctgactgcatcctttcccgcagaaaatcagggccgcccccatcctggccccctgtcctccgactccctgttccagcctctcctctccatgccaatggccccagctgcacctcagccctctgcctctcccaccaggccctagaaaggtctgtttaggcagggcgcatgcctgtaatcccagctatttgggaggctgaggcggcagaatcgtttgaacccaggaggcgaggttgcggtgagccgagataacgccattgtactccagcctgggtaacaagagagaaactcagtctcaaaaataaaataaaatagaagtctgtttatacccacagatcccctgtccctcccctgggcccttcacaatcctcccaggactgcccgtcagtcccagcataagactctcccatgccccgctgtgctgccaccaaggcgacaatgacagtgagagcccataagacacagtctctgccctggagcagctcatccgcctggcaccaccttctccttcctcctctacttgtttcccccacctcctgttctggcaagtccctgagcccagcagacacactcttgcctctggcctttgcacctttcctgcttttttcctggatacctccctgcatctgtccttcaacacctagttccagggtcacttacacaggaggatgtcctggtcccgtctccccaccccagtctggtcagggatccccggggctgggttccctggagcccagagtccaggtgcctccagggagggcagggactgggtcccaaccacagggcgtcttgcgcaatgaaggactccaccgcctcagagtgaaaaggatagacgaaggataggcgcagtggcttacgcctgtaatcccagcactttgggaggccgaggcaggcagatgacttgaggtcaggagttccagactagcctaggcaataaggtgaaaccgtgtttctaaaattaaaaaaattgttaaaaagtaatatatactcatttaggaaaaaatgtatgagaagaaaataaaaattggccaaaatacatctacccagagctaatttatgttaatcatttggcacatccttccaattttttctatgcatattatgcagggatatattttttcattatcttttactttttttttttttttgagatagagtctcactctgttgcccaggatggagtgcagtggcacaatcttggcttactacaacctctggctcccgggttcatgcaattctcttgcctcagcctcatgagtagctgggattacaggcacacgccactacgcccggctaatttttgtatttttgtattttttttttttttgagacagagtctcgctctgtcacccaggctggagtgcagtggcacaatcccggcttactgcaagctccgcctcctgggttcacgccattctcctgcctcagcctcccgagtagctgggactacaggcacccgccaccactcccagctaattttctgcatttttagtagagatggggtttcactgtgttagccaggacggtctcgatctcctgacctcgtgatctgcccgcctcagcctcccaaagtgctgggattacaggcatgagccaccacgcccggctgttttctttcttttttctttttttttttttttttttagtagagagggggtttcaccatgttggccaggtggtctcgaatttctgacctcaaatgatccacccgcctcagtgtcccaaagtgctgggattacaggcatgagccattcattgtggcttgcttttttacaaaattttgatgatacaatatacttgcctgggtcctgcatttccccttaataacattgtgagtattttcttacatcatgaatagtgcttcaaagacatgatatgaacggccctctagagtactggcccacggctatacctacgtatggacattgatctgtaattgacagggtgatctttccttttctttctcctttctctctgtctctttccctccctccctccctccctctttctctctttcttttctttttttcttttttttttttgagtctcgctctgttgcccaggctggagtgcggtggcacgatctcagctcactgcaagctccgccttctgggttcaaatgattttcctgcctcagcctctggagtagctgggactacaggcacgcaccaccacacccggctaattttttgtatttttagtagagacggggtttcaccgtgttagccaggatggtctcgatctcctgacctcgtgatctgcctgcctcggcctcccaaagtgctgggattacaggcgtgagccaccgtgcctggccctctctctctctctttctttctgacagggtctccctctgtcactctggctgaagtgcagtgctgtgatcataactcactgcagcctcaacctcctgggtcccagtgattctcccacctcagcctcccaagtagctgggactaaaggcacacaccaccatgccttgctaagtttaaaattttgtagagatggggtcttgctgtgttgcccagcctggtctcaaactcctggccttgagcaatcctcttgcctcagcctcccaaagtgccgggattacaggtgtgagtcactatgtctgtgcttgatttcttctttcttttttttagatggaatttcactctgtcgcccaggctggactgcagtggtgcgatctcagctcactgcaacctctgccttctgggtttaagcaattctcctgcctcagcctcccgagaagctgggattacaggtgtgcaccaccacgcccagctaatttttgtatttttagtagagacagcatttcgccatgctagccaggttggtcttgaactcctgacctcaagtgatctactcgccttgccctcccaaagtgctgcgatgacgggcgtgagccactgcgcccggccgatttttttcttaataggcttctgccttgtctaacttcccagagtgaacatggctagctttcagaactgaatgagacctccgtgaatgctatttcacaggcaggagggtgtgaatgtatttgcagggagctggtgggggctcagcctgcaggacacagcctgaggatgggctcgggcaggccttgtggggcagggagaatggcggagtacagcaggaatgcctctgcaggtgcgggtcctgagggtcatttgggtcccaagccggcctggggtctctgcacccagccggagatgcgactgtgcctgggcatgaggctgggggctgtgggcatcgcctgtccagggcaggagaagcaggggcttgagaatgtctctggcctgactgggctagagctctaaaactcccccctctgccaggggacccccccagagcttgcatttcttcctcagagagagtatctggggaagaacccaacctggagcttctcagagccggttctcagagctcatttcccgggacgctaaacaccaacagcaaaaaaacactctctcatatcaatgcgttaggagcctgcacactccctccccgagactccagtgcacctggcgtgttgaagctccgtgaagcccagtgggagacagcggctttgttttgctcaactctagttttcccaaacataatacacatggggcccttctcaccaaacgcagcttatcacctccctgggaaatgctggtgattgataaagcaggcactcggttgctatttctattaataataataacatcaataatagtaacaggaggaggaggtcccggtcatcactgatcgctaggcagagaatgaggtggactttaaaagaaagcctggaccaagaggccggacacggtggctcatgcctgtaatcccagcactttgggaggccgaggcgggtggatcacttgaggtcaggagttcaagactagcctggccaatgtggtgaaaccccgtctctactgaaaacacaaaaattagctgggcgtgatgatgcacgcctgtaatcccagctactcaggagcctgaggcagaattgcatgaacttgggaggaggaggttgcagtgagctgagactgccactgcgctccagcctgggcaacagagtgagaatcgtctcgataataataataataaatacagaaagaacaaaggtattgctggtccatgtgctgtcaagagccccctggaactttccccctctctgggttacactgagatggcctggggcccccttcattcccagcaaacactctgtgccccaccctcccctccctcccttcagggtcccttttctcagtgggccccccctagctcatcctccccgtccaaagcggggctgcggccttgcccgtgggtcgtgggtcggccagcagggccaggtggcttcatgccttttaatgccttgcagcgcactcccccatttcctctccatccccacagcccagccccgcctcatcctctctccctgggcccgccgcagcctcctgcctgggcttcagtctctcccctccagtccatctctggggtcctgctatgccagagctgaccctgcctctgccctcctctagacgcctccggggctccccagtgccctcgggaagttcagcctgtattggaagccctgcctgggcatctgcctttctccccattcccctctgcatggcccctcactcgcagccctcactcggatacacgttagccaggatcagtccttggaccctctcgccgggcactccacctttgcacatgctgttccctctgctcaggacgcccttccctttcatccaccgggaaagctcctgctcaccctcttgaacccagcccaaaggtctccactcattcccccattgcttattgattgaatggagatacagcaggcctgcaggtgcagaggtggagaggggccgttgtctgtgaaaggacctcacaacgtcagccttgcgagctgctctgaaggcttgaggtgagactcactccgctcagggcttggcacctggaggcgtgtgctgggcacaggcgatgatgccttgcagggcacgtgttgctaggctccttttttgttttttttttttgagatggagtttcgctgttttcacccaggctggagggcagtggcgccatcttggctcactgcaacctccgtctcccaggttcaagtgattctcctgcctcagcctcccaagtagctgggactacaggcatgtgccaccatgcacgattaattttttgtatttttagtagaaacctggggggggggggtctctctatgttggtcaggctggtctcgaactcccgacctcaggtgatccacctgccttggcctctcaaagtgctgggattacaggcgtgagccaccgtgcccagcctaggctcacttttcagagaaagaagatggctcagcgaggccacatgaccaggaagtggcacagccagggtttgagccctgggcctcagccccctccatgcccacctcctgcctgcagctcccggagcctctgcggcaccccaggctcctgctgactcccccggcagccctggaggtgagcatcacacgtcatttcagagacaggagaccaaggctcggtgaagtcaagtgactcagcagggctgccggtcccggggagcgtgcacctggggctccagcccacagtgttttccaagtctccttggtgcctctggacagaggaccgtgacaacagcgtggccacaggcggacagcctgaggctgctcggcgctcagcacgcagtgacccagctgcagagggaagggggtgtgaagggagatgaagggacactcccaaagggagggggtggggtccccccgccaatcactttaataatgcagttgagaactgagtggaatgggggtgttgctgcaaagggaagcctggttttgttgaaacatgtggcatagggctgctttaaatagggagtctctttattttgaacagaattccagtctattctgtctcctcttctctgcagaatgcctgctgagcagcctcgtgggggatggttgaggctgggtttgaatcctggctttgctgctgaccagcctgaactccctggtggcctcgggcaagtgtcctcacctctctgagcccactttcctcccaggtagcatggggttactgtgatgcttggacaagacagtgagcgcttgggatgagacaatgaatgtgtgggacatggcgagcatgcagtaatagatattttttcattgttaattcagttgataatgatcattaacactggtcctggccagccacagtggctcacgccagtaatcccagcactttgggaggccaaggcgggaggattgcttgagctcaggagttcgagaccagcctgtccaacatggtgaaacctcgtctctactaaaacaacaacaacacccaccaaaatttaccctggcgtggtggcacactcctgtagtcccagctacttgggaggctgaggcaggagaatcgcttgaacccgggaggcggaggttgcagtgagctgaaattgcaccactgcactccagcctgggtgacagtgagactctgtctcaacaaaaacaaaaacaaaaacaaaaacaaaaaaacaaaacactggtcctgtctctgggcttccagtttctccctcagcatctttcctctacactggctgtcagaatgaccggaaatgcagttcagaccttgccacatccccactcccagcctcccatggctatcaccctcgacaaagtgtcagaggcccttcagaacctgccctgctgccctctccttgactctagccatagtagggagaagagagatgcatggggttccctctgcttgccacactctgtccagcctctctgcctttgcacaggctctgccccttttctatactgtcctcctccttgttctctggaaaattccaattgccttccttggaaaagccctttttgacccctggtccctcatcagtcacacacacacactctcttattagatccctatcgcagtgactataatttggtttcacacgtctgtctccttgtctaggctgtgagttggtgtgagtagagactgtgttggggcgacttctgcattcccagcacgctatgcaaggccaaattcgtgacagacttcggccaaggtctgctgagtaaacagactagagtgtctaaggctcttattggggaacaccctggttgtgctggtccctgtttccctcacgctttttggcctgggtgataatgccaacatgtcaaaatcatgttgacatcaatatgacagaacttgggaacggaaaagcattggtgttctgcttccaacctattctgctttttaccttcgtgtgcacgtctgagatcattaaagctacatcacctttcttgtgtttgtcatcatttttactttcatgatttctgtcctcatgttttaggtatgtctttcgattttaagtcagtctgaaatccttgtcttttaactggaagtttagctcatttacatttactataattactaatatatttgaaattcttcctataatgttattttgtgctttttaattgtcctgatttttatagcttattctttcccctttcctgtcttctttgtattgactgaatttcttatgattccatttcttctctctactgtattagaatttatatattttctcattatttagtggttacccttaaaatttaacatgcatacctaaagaccaaagccagttaattcttctcttctcctcccaaataatacacagaccaaagaccagttaattcttctcttctcctcccaaataatacaaataccaaagaccagttcattcttctcttctcctcccaaataatacaaagaccaaagaccagttcattcttctcttctcctcccaaatgatacaaagaccaaagactagttaattcttctcttctcctcccaaataatgcaaagctgatctcatctctgactctaaaacaaagagacatcctggtcagcttcccaataaggtaaaagggggggaatcataatttgttaactgccgattattgccagagctgtgctaaatgctctgaggtatgatctcatttaatctttgtggaaattctgtcacatgggggttatcaagcacatacccctgctcccttcatatctggtggttcatagctgagaaaatgaaggttcagagaagtaaagtcacttgtccccagtctcacaggctccaaagttgcagaaccaagactcaacgtctccttctcctgagcacagacatgggagtctccaccacacctacccaccctaaactgaaacagttgggctgtctgtgggcttcacaatgctttttgagctgtggggcccattcattcttacattaccatgtattgtttcgctcatttgacaggttattttttgagagctgctatgtgtcaagtgtcatactgggctctggggatccagctgtggacaagacagacaaagccctgtcttcctagatcctggcctcagagaagaagagagacactaaacaaaacaattatgccaacaatcatttaaccagcaaaggtgtacacagatcgtggaggctgccctggttgcagggggaggcaggcctggggcccctccaaggcctgatttgaaacaccctagaccagatcacctctgaagttgtgagtgtcatcaccctcatggccctgacacagagtaggatgggcaaggtggggattggttcttgacgcaggtaaatcctcctgccccctcaccctaacatctttagcctgacgaagatgttgacattttgtcctacagtagaggacctaggcctggggccacctctgacagccacatagctgcccacacttccaagttccctggatcttcagcccccatctgctgagcccacctccacctatgctgggctctgggacagatctcaatgatgcagatgtgaatccggcaaagggacgtggcccccatcaatgactgccttctaaccccgatggggactttccttttatcctgcaacttggcctgtgtagggggactttccactttggttgtggtaggtaaatattactaaagctgaaaaaaatcccactgagatctgttggggtttttaagaaaataaattgtgaagaaattccttattaaaaatgtaactgtggtaagaaaacaattaagtgaactgttcatcttaacattataaattgtatttatttatatttatttatttatttgagacagagtcttgctctgtcaccaggctggagtgcagcgatctcagctcactgcaacctctgcctcccgggttcaagtgattctcctgcctcagcctcccgagtagctgggattacaggcgcctgccaccacacccagctaattgtttgtatttttagtagagacagggtttcactgtgttagccaggatggtctcgatctcctgacctcatgatctgcccgccttggcctcccaaagtgctgggattacaggcgtgacccaccacgcccggcctgtttatttatttatttatttttaagacaggatcttgctctattgctcaggctggagtgcagtggcatgatttcagctcactgcagcctccgcctcctgggttcaagtgattctcccaccttagcctcctgagtagctgggattgcaggtgcaaacaaccacaccaggctaatttttgtattttagtagagacaaggtttcaccaagttggccgggctggtctccaactcctgacctcaggtgatctgcctgcctctgcctcccagagtgctgggattacagacgtgaaccactgcactcggcctgtttttatgttttgaatataatgagtcaatcacaaaagtttagcaagcttactgttgtttgtgtgtgtgtgttaatttttttacattcagattttaaaaaccgttatttgtcacatcaactgtctttatgatgacttctcatatttcttgcttgtccctgagacaaggaacttgtgcctccctctccaacagggacttccctgatgccatgactggcagcactgcaggggccgttgtgggcccctgattctcacactgacccggctcaggcctagacgtccctgtctccctcctcccattcatcctcctgggagtggcctcctgagcccttctgggaccaggccctggcctgggtggaaagtctggctggatggctacccgcctcccacccttccccaccaccaggagcccagagaggcatctgaacctgggtgtaaacaacaaggggatgagatctatatcagaggcatgtgcaagaccaagcaaggcagcaggactttgcctaaggcacctgcgggtggggtgggagagtggggttaagctgaggcacaggccatgggcctacaccgcttcctgggcagccttccctggcctcccctcactatgttcagctcagcagccccccgccagctcgtgcacgctgctactggacttgtttaccttccttttttttttttttatgatggagtctcgctctgtcgcccaggctggagtgcaatagcatgatctcagctcactgcaaccttcgcctcccaggttcaagcgattctcctgcctcaccctcccgagtatctgggattacagtaacacatcaccacacctggctaatttttgtatttttagtagagatggggtttcactacgttggtcaggctggtctcaagctcctgacctcaagtgagcacccgcctcagcctcccgaagtgctaggattacaggcgtgagccactgtgcccggatgagacttgccgactttctgaacgacctctttctgcacgcagtgtcgagagggcagggatctctgtatgtcctgctctctgggcctcgggtggtgcctggcacacactaggtgctcaataaacaaatcagggctgcactgaatgctgcagatggattagccggggctgttcagacacaggagggacagcccatgcagggagaaagatgcacgggtctcagctcagctcctagactcgccacggggtggtgacgagaccacggcatccttgtgaggattaaactgtctcgatatctgtaagccatggagaagagcgcctggcacagggcaagcacatctgtctgtgactatttaaaggcagggcaagtttctggaagggtgggaaggaaggggctggggtagcttctggtgcccagtagagggtgcccctgagcttggtgtagctgggagcgccaggcatactcatcctgatctgagatggggacagggtggcttgcagaaaggtgtcccctaggaggagttggtgtggcgactccagctgggtgtggtggcaggggtgtgtgggtacaggctacatctgggaggctaggaagaagctggggcttccagatgagcaaggacaaggccagagccaggctgggctgtggggatgtagactgggactcagtggcagttctgagactgagtcaccagggtgcagcgccagggatagctacgaattaggaagcattacgaatcgcgttgaaaaaaccaagttctgcagccagcctgcctgggccgagtcccagctccgttactaaccatgggaccaggaccgtttgcaagtgtcttaactctcctatgcctcagtttcctcatctgtaacatgagaagaataggacctactcagggggctgtcgtgaggctgaaattcactgaccctgtaaagggcttggagcaatgctgggggcccgactgacattctcccgcccaccctcgctgagctgtagaaataattggtctattttctagacgagaaggcaggctcagagaggtgactcaacgccttagcgtcattcgtggaggggagaacgcgggtcttgtgcctctcaggactcgcaggctgctcaacagagatgtgggactgatactcccacccagcagcctgtcccgaggctcaggggccatgtggctttgcaggacgccaagcaattctacgcctttgtcaatttaactttaacaggtgtgagccaccgcgcccggccgactgttcttttctgtaagtgtgctgtgagtcatcatgagaaaaagttaagaagaaactgacaaagtatgggaaatcctatttgaaaagggtagaaactgaggctcggagtggtgacaaggattatgtgggccccgagatggcgctgctgagggaatgaagaggataactcagctggaatgagagccagggaggccgcagttagacacgaagtctcagcagcccgggaacggacggcagagggcgcactgctccctcctatccagaggacctcctggctgctggtcgcaggcccgcggctggggaatgtcccagttgacctcaagagaggtcagctcctagattcccctctacagatcctcccttccgccattttctttctttctttcttttttgccttttttgagatggagtctctctctgttgcccaggctggagtgcagtggcacaatctcagctcactgcaacctacctctgcctccgggttcaagtgattctcctgcctcagcctcctgagtagctagtactacaggcacgcactaccactcccagataatttttgtatttttggtagagacggggtttcgccatgttggccaggctagtttccaattcctgacctcaggtgatccaaccgcctcggcctcccgaagtggtgggattacaggcgcgagccaccgcgcccggccctcccaccgttttcttccttaaagggctctaactgggaaaagtctgtccaatcaaaagctccatgtttcatgcccctggagggatcagccgcctggaaaatgcgaactagtgggtaatttaaaagctattcttggtatttgccttgataatgcactatggccggggtttttatttggttagtttgggttttgtcttgtttttttttttttttttttttttttttgagacagagtcttgctctgccacctaggctggagtccagtggcaaaatcacagctcactgcagcctctgcctcctggcctcatgcaatcttcccacctcagcctcccagggatctgggactacaggtgcgtgccaccacacctggctaatttttgtatttttagtagagatggggtcttgctatgttgcccaggctggtttcaaactcctgagctcaagcgatccacctgccttggcctcccaaagtgctgggattacaggtgtgagccaccgtgctgggattacaggtgcgagccaccgcacgccgccttttttttttcaagacggattcttgctttgtcgccaggctggagtgcagtggcacgatctcggctcactaccacctctgcatcctgggttcaagcgattctcctgcctcagcctcccaagtagccaggtgcccgccaccacacccggctaatttttgtatttttagtagagacagggtttcaccatgttggccaggatggtctcgaactcctgaccttgtgatccacctgccttggcttcccaaagtgctgggattacaggcgtgagccaccgtgcccggccaggttttgttttttgtttttgcaacagaattaccatcctgtagctgccccactttggctgtctgggcctggcttctccacactgactctcagggtgggacagacatatataccttctgaggcacatggcaagcccatgggggctacagcttgctgggcgaccttggataagtcactcagagcctgtgcctccatttccacgtccataagatgggagaagtcatcctgccctcacaggaataaatggggttagatgagcgctccctgaccccctgctccagataaatgctttgaaatttttgtttctttttcctcatttaggaaaaggtgagcaaattccagtatagccttttttttttctttccagcttgcataggattttatacttagtatttttaaagcttaatttgttctgattataaaagttattggctgggtgtggtggctcacacatgtaatcccagcactttgggaggccgaggcaggtggatcacaaggtcaggagttcgagaccagcctggccagcatggtgaaaccccgtctctaccaaaaatacaaaaatcagcagggcgtggtggcaggtgcctgtagtcccagctactcgggaggctgaggcaggagaattgcttgaacccgagaggtggaagttgcagtgaaccgagatcgcgccactgcactccagcctgggggacagtgcgagactccatctcaaaaaaaaaaaaaaaagttattaaatgctctcactgaagaaaatctagagaataaagaaaacataaagaagaaattaaatatccctgtaatactaatgcaaagagaaaagaccctgttgaccttcctgggtgtttctcggtcttttaaaatatattgcttaagttttaaaagtgaattggagatcctattcacattctttgaaagctcagtattacgttttgagcatttccccatgtcatccactattatttgaaactctgttttaaatagctgcataatattccattgtaatgggcacagtgattcattgaacccaggggtccgcaacccctaggccacagaccggtactggtgggtggcctgttaggaaccaggctgcacagaaggaggtgagcagcaggcgagcgagcattactgtctgagctctgcctcctatcagatcactggcggcattacattctcttttatttaaattacaaaaaaatttttttttgagacagagtcttgctctgttgcctaggctggagtgcagtggcacgatctcagcacactacaacctccgcctctcgggttcaagtgattctcctgcctcctgagtatctgggattacagacacctgccaccatgcctgggttatttttgtatttttagtagagacaggttttgccgtgttggccaggctggtctcgaactcgtgacctcaggtgatccacccacctcagcctcccaaagcactggggttacaggcgtgaggcaccacgctcggccagcattagattctcataggaacgtgaaccctattgtgaactgtgcaggcgagggatttcgtttacttgctccttatgagaatctaatgcctgatgatccatcactgtctcccatcacccccagatgggaccatctagttgcaggaaaacaagctcagggctcccactgattctacattatagtgagtagtataattattttattatacattacgatgtaataataataatagaaataaagtgcaccggccgggcgtggtggctcacgcctgtaatcccagcactttgggaggccaaagcaggcggatcatgaggtcaggagatcgagaccatcctggctaacatggtgaaaccctatctctactaaaaatacaaaaaaagtagccgggcgtgctggtgggtgcctgtagtcccagctactcgggaggctgaagcaggagaatggcgtgaacccgggaggcggagcttgcagtgagccgagatggcgctactgcactccagcctgggcgaaaatgagaggctctgtctcaaaaaaaaaaagaaaagaaaagaaaagaaaaattagccgctcacagtggggtgtgcctgtaatcccagctactcgggaggctgaggcaggagaatcgcttgaacctgggaggcggaggttgcagtgagccaagattgcaccactgcactccagcctggtgacagagtgaagcaagactctatctcaaaaaaaaaaaaaaaagaaaaagaaaaagcaatgcaccataaatgtaatgccaaaaccatctcctcgacaccccagtccatggaaaaattatcttccatgaaaccagtccctggtgccaaaagggttggggaccgctgatgtaaccagtcccttgtcagcaggagttgaggctacttctaaacgttggtagtcgggccatccttaaacacaactctttgaagcccctctaataatttccttaggatggattggtttgttccttaagctggaaccacacttgcttgccatacaacctcatagccggccccaggagggacccagagccgcccgctaaaagccttgggtggattcagtggtactttgttaaattaagtacatgaatatcctacggcccggcaattccctctgggtatatattccacagaaatgatcatgcagctcccagaggggtcctgagggaggatttgcggtggggcagctagaagcctccgggacgtccagtctcatcaggaagcagtgggggacttggcagatggacgggggtgggtgcccatcaattctgtagcagcaacagcagcagagtggacacacacagcaatatgaaccactctcagaaacacaggccgagcgaacacagtgagacaaagacagcgatcttaacgcagcttcatctgcataaattaagaatacgtgtacgcaaagcaacaatacccattttgcaagaacacacacaagcaaaaaatccacagtaaacacattaggaggactttctgtggggagagggtaaggcggggatatgaggataaaagggagggaaggaggaaggagccagtccggtgaggaccaggtacctgactgaggagcgaggagtggacaggctgggcccagccgaggtggtgcaccttccccccaggtcccgaggagatggaggcgaagatctgcacccggtcttctcccagggggccagggcatgtgagctgcggggaggcagtctcctggcctctgccttaaaaggcatttcctgaggctccaggcttgcaggccccaccaatctcaaaaaacagtggtggggccggggcagggcctcagagaattgctgatttttttttttttttttttttttttgagacggagtctcgctctgtcactcaggcgggagtgcattggtgtgatctcagctcactgcagactccacctcctgggttcaagctattctccttcctcagcctcccaagtagctgggactacaggcatacgccactatgcctggctaattttggtatttttagtagagatggggtttcaccatgttggccaggctggtctcgaactcctaacctcaggtgatctgcctgcctcagccttccaaagtactgggattacaggcatagccaccgcgcctggccatgatattttaaaaaacacatcctctgtcttactatggggaccacctactgtctctgtcatgtggcagaagaacattttaactctctcaccaaagatgaatggcaacgttctagcttcccagagagaggccagcaccgtcaccccgtggacttagagtcccccaaagtccccgcgaggttcttgctgcccacaccgcacccaggccaggggcaggcgagaacaggagtctctgagccaccccccagagctcacgggagggcgtcgcagggattcgcgtcggctcccaccgacagatggctgcaggcctctgccaaggatccgggcaggagttcgggagctggcctcccattcagaggcaaacaactgctgggcacctcctgtgtgccaggctcggccctaggtgctggggatccggcagggaacattgcaaagtccctgccttcatgcaggtggcagcgcggcgggggacagatgacaaccaaggcggcaggtcacacgggaggctctggaatccccagaattcagcctgccgctaccaatgctccagtgccaggccctggtgtgtgtgtgtgtgtgtgtgtgtgtgtgtgtctctgtgtgtaagggagaagtacactcaaatgaggaagccacatagaactcacagggcggtgcttctctcatcatccctcagacccagaaactccgcttctaggaatttatcccaagggcagagtccagaacattaggaagaatgagccaacggatgtccccccggtgttgttcatatcaactcagaaattggaaataaggaggccgggcgcggtggctcacacctgtaatctcagcactttgggaggccgaggtgggcggatcccttgaggccaggagttcgagaccagccgggtcaatatggtgaaaccccgtctctactaggaagtacaaaaattagctgagtgtcgtggtgggcacctgtagtctcagctactcgggaggctaaggcaggagaatctcctgaacccaggaggcagaggttgcagtgagccaagactgtaccactgcactccagcctgggtgacagagtgagcctccatctcaaaaaaaaaaaaaaaaaaaaagaaagaaaagaaaaaagaaaaagaagggcctggttaaataacaggatgctggctgggtgtggtggcttgggcctgtaatcccagaactttgggaggccaaggcgggcagatcatctgaggtcaggagttcgagaccagcctgcccaacatggtgaaaccccgtttctactaaaaatacaaaaaattagctgggcgtggtggtgtgcgcctgtaatcccagctacttgggaggctgaggcggtagaattgcttgaacgcgggaggcagaggttgcagtgagctgagattgcaccattgcactccagcttgggcaacaaaagcaaaactccatctcaaaaaaaataaaaaataggccgggcgcagtggctcatgcctgtaatcccagcactttgggaggccgaggcgggcagatcacgaagtcaggagatcaagaccatcctggctaacacagtgaaacctcatctctactaaaaatacaaaaaaattagctgggtgtggtggcgggcacctgtagtcccagctacttgggaggctgaggcaggagaatggcgtgaacccgggaggcggagcttgcagtgagccgagatcacgccactgcactccagcctgggcgacagagcgagactccgtctcaaaaaaaaaaaataaataaaaatataaataaaaataaaaaaataaaaaagctaaaactccatttacaaatcagcagcaattgtgcaacacactgtgcatgggtggggagggtgtccgaatgcaaagacaccaaagcgaaggagagctacccatggctgtgggattatggttggcttctgtcttcctgtttttacttaggtatattttctagtttttctcaattaatttatattcattctgtaataagtaattaaaaatacacttatggctgggttaggtggtttatacctgtaatcccagcactttgggaggccaaggtgggtgaattgcttgggtccaggagttcaagaccagcctgggaaacatagtgagaccctgtcttcataaaaaagaaaaaaaatcgagaccatcctggctaacacggtgaaaccctgtctctactaaaaatacaaaaaattagccggacgtggtgggtggcgcctgtaatcccagctactcaggaggctgaggcgggagaatggtgtgaacccaggaggcggagcttgcagtgagccaagatcgtaccactgcactccagcctgggcaacagagcgaagactccatctcaaaaaaaaaaaaaggtcaggcttggtggctcacgcctgtaatcctggcactttgggagtccgaggcgggcagatcatctgaggtcgggagttcgagtctagcctgaccaacatggagaaaccctgtctctactaaaaatacaaaattagccgggcgtggtggcacatgcctgtaatcccagctactcaagaaggctgaggcaggagaatcacttgaacccaggaggtggaggttgcggtgagccgagatcacgccattgcactccagcctgggtaacaagagtgaaactccatctcaaaaaaaaaaaaaaaaaaaagaattagctgggtgtgatggtgtctcccagtagtcccagctactctggaggctgaggcaggaggatcacttgagccagggaagttaaggctgcagggagccatgatagtcccactgcactccagcctgaatgacagagtgagaccctgtctctaaaaatgaaaccatttacatagagacaggaaagagccaggaaggcattagaacaaaatgtaaacagtagttatttatatctggtgatggaactagggtgattttttcaattttttatttggataactaaagagttattacttttttttttttttttttttttaagacagggtctctctgttgcccaggatggagtgcagtggtgaaatctcagctcactgcaacctctgcctcctggtctcaagcaagcctcccacctcagcctcttaagtagctgggaccacaggctcatgccaccatacctggctaatttttggttttttagtggagatggggatttgctgtgtggctcaggctggtcttgaactcctgggctcaagcaatccacctgcctcagtctcccaaagtgctgggattacaggcatgagtcaccgcgccaggctaaaagttattactttttaaagagcctctgggccaggcgtggtggctcacgcctgtaatcccagcactttgggaggccgaggcgggtggatcacctgaggtcaggagttcgagaccagcctggccaacctggtgaaacctcgtctctactaaaaatataaaaatttgctgagcgtggcagcaggcgcctgtaatcccagctactcaagagactgaggcggaagactcgcttgaacccgggaggtggaggttacaatgagccaacgttgcgccactgcactccagcctgggagacagagcgagactctgtctcaaaataaataaataaataaatacaaaaataaagagcctctgattaccctcgacgtggtccatgcctcttgctgtctgggatgtgtccactgagggaggccaagcccactgacaaacactcacaagcatccactctcgtggactggacgaacacaccctccatccatgtctctgggtggggcagggggcggtgcaagaacccctgggtggggaggatgagaaatagaggcgtctggatccctattgatgcttttcaccctttgacaatgtccaccttgggtgtgtgctttaccaggtgcatgatatacggagggagcgggcctgtgcatgacttatcataaatgaatgtacgtccgctggtggcgctcagcacgtttgtgggactgaattgttcactgagccccctcgcccccccacaaagagaaacgggtccaggttctacgacggggatgttgccacggcctggggctgctggtgagtggcgtgggtgcctccctgtcccacgctctccctggccatttctgcaaagcgcgtttccctggcgtgccgtcccagccactggctccttttcctcctcatttcttccccactagaatgtgagctgccggggctagggctgggctttgcctggctcggtcaccacccaggacagggcttggtgcagagccggtgctgccggtgtctgttgaacgtcacgtgtataagtgggggaaggatggagtgcagggaagccgggggcaggtgcatggggaccgcacagtgcggaatgtcacctgctcaagggagatgtggatggatcggtggagactgcaactagggagatgcagggcagactcaaagcaaactggcagacatgggagcctgtgggaggtgggcgtggacagagggacaaggccctgcgggagcggggggtggtgatgtgacgacgcccctgacgtttctggaccccttcgctggcccttgccccacagccaccaggaagggactgctcccctgagaggtcccttttcttccctgaatctggctctcaggatggtcagatgggagcagccaagtcctcccaccctttcccagggacagaccaggcagaaaagcagccgcatttcttacgggagctgttacatctggaagattagatctggaggggctgggacctctggcatcggcaccctcttctctcccagctttacaggctggaacaggaggaggcttgcttggaggcaggagttggaccaaatcagcctggggtaatgatcccctgggaatcactggcaatgcctggagatatttttggaactgggggtggggtgctactggcatctagtggccggaaatgctggtaaacatcctacagcacacaggacagagccccccaccctgcccgccaaaggatgatagggcaggccccaaatgtcaatagggcagaggttgagaagccctgctttctaatagcacagctctgtccccccaagccctcgcttacggcctatcctaatcagagtcatcattaattgagtggcagctgccccatcctgagcaccagccacaggccaccatggcgccaagcaccacagcgttctcagcctctctgctctccaattctcacaccagctccaggaaatggggacgcaaaccctgcactgcccggcaaatgaccatggaaacgcctcctgtcctctgaccactcgccaggtgccagcacacaagctaacgccccaataagtaccagacccatcagccctcacagcaacacctcaacgcaggggcttgcattgtccccgcttttcagatgaagaaactgaggctcagaatcatgccgtcaccttcccaaggccacgagagggtgtggtggtgcagatgccacaggggtccctgtgaaagggttgctctccacaccccagggactccagggctcggcctaggccgacccgcctgtcctgtgccgggggggctgggcaggtggcctgcacttgggccccgacacggtggctcagagacagggagcactgtgctctcaaagcccggagggcctccactccacctcgggagcccggctccagctgataggatgcagacccgcaggccacatccacaggtgccggagacggggaagccccggtgtggggaggcccagaagggatgggctacatctgcatgcctccccagtgtcccctccaaggtccccctctgcccgctggccccgcatacctggatgccgttctcttgcaggttcaggtaccgcgtgttgaccgggatgctggctgggacctcggccaggtctctccgtgtgcagatcacccggctggcctggttgctgcaggagcaggccacggggcaggaggtggccggcggggagccccctccggcggcagacgtcacggccactccacctccaccggcccccaggggtggggagaagagccagaggaagagcaatgccccgtggggccaggacatcctaccgggcggcagcggggggcacggggagccgcgggcacgcgccatcctcaatgttcatgctccgcgtggacgctggggggctgtgggtgggggagagaagggggagaggcttggtgagggacaggagcccatgtggcctgggtgcttgccaacacccaggcagccccatcgccgcctccctgccccatgcccagaacaaagggacagggagggagacagctgccgatggacccacccagcaggctggggcaggcagagggaagcttggcccgcctggccctgcactagctcatcctctccatgctggcaagattctacgcccattctgcagcagggaaaactgaggctgggggagaggaagtgcctgcccaaggtcactcatccagtaagtgcagaagttgtccagattcaaaacccagttctttgcatgacttcaaaaaggtagatacatcagaggagtgagacagacagacagacagacaaggcgagggggcagaaacggggaagagcaagcgaggtggcgaggacctcgctcccatcccaacacccgcccggtccccttgccacctgcgtgatcacctgggaggtgggtcccagcctcctctcccctccactccctccccctctccccatcccagggatgttagcgaagagatgcatttcccccaccccctgtgccctcagctaaaccgaaagaccctccgctgcacaccctcctgtcactgcccaccctgtccaggccctgtgggggcctcacagcagcttcagagacttgagtcagactcatgggagaatctgagggagagagaggtaaggtggcagacaaggcaaccgtggaggtgacaggtgtgggcaggtgaagggagggctgggaggcagcagggtgaagagggaggagactggagcttgtgtgtgagggtggctggggacctgacggggggcggcacaggccgagaggccaccagctgcaccccctcctttgccccgagactgtgggtgctccaggcagagacagccccgatgggactcatgccagctgctgccgcaggaccgagcttggttctcggggaggggatggggaagggaagggggtccagggactctgcctgggttctgggaggaaagcagacagcggggactcgggccctctgagaagtcacgctgtacctccccaatctgtcctgccccgccatttccatggaaccagagagggaaaggggatgggtgagtcacagcaacgataccagtaacaatagtctctccggaacactgggtgagcccttgcaatgcagcaaactgtatcccggtcatctcatgtgagcctcataatgaccataggagaaagctattaggatgcccaatttacagatggggacactgaggcactatgagggaaaacggcctgtccaagggcacagagcaggccgggagggcgcagagggggtacttcggccctgggtctaccctctggctcccagctctcctttgcacgcagcatctctgagtacacacaaatacacccacaccagcaggccctgccccaacacaggccaaccccaaaccattcccaagagaccaggaggagggcaggtcacacaaacacgcacaccgacccactcacacactcagcagtgatggggcacaccctctcacggtggactctcaggacccccctctcacggtggactctcaggacccccgacacaggctcacccccaggcacacggctatgcacacacacagtcactccctcctcctgcagtttccaagaccattttaacccagataaaaatgtgtgtgcatacgtctgtgtatctgagtgcatgtgtgagagcgagggctagacagagacacagagagacagagacagaagcagaggcagagagacagagggcaggggaaagagggagctggggagagaaagagagagaggttgattctgtgtccacccgggctcatttttctcctgcagggctggggccgtgtgtctgtgtctgactatgtgagtgcggtgagggtcttcattttcctgaatgtgaacagggaggtcaatgcccagtccttatcctgggtcaggggctcctacctcttaagaccctggcgatgatccagcccacaccctcttagccaaagggctggcccaaagcgcagggcctggatttgaggccgggggaccccgcagggcctgtgggagcccacggcacccaccccggcctccaggcctgccgctgccatgtctacctccgcatctgtccccagctctcccgctgccagcccgcatccccccacccccatcacggcttctgcagcgactcggcctccctccccttccccccgccgccctccgccatctcccatccttttctccccacaaccccacggtgggggacactcaccctggtggcttggcttccgctgggcctctccctgcgcccaggcccccccctccacatgcctccggccagccggggtctctgcctccccagttctccagggcttcctgtcgagatcgtgctggggggggcgcaggggcttcttgggtctccccgcgccccccccactggcctgtcgcccttcccacccctggggggggctgtcctttggccactgcagcagttctctgctcccctccccgctcgcctcctccggtctccttccaccccctctcccacctctacctcgactctcccccgaccgcagcctcctttctctccacccaccgaccccagcccccttaactctctctctgcccctctcggtcctccccctccgcctctggtccccgtccacctcctctggcctcaaccccctcctgagtctcccccctcacaatcttgcctccctcgggacccccaggccccttctctccttctcctccatctattcctccctcttgctctatccctgtcaccctctcatcggccctgagcccgtctcagtcaggttgtctgtctgtccgtctgtcttggtccctttctccccggctctgtctgtctctctctttctccgcgattacaatttctagtcacacggcagtgcagagccaagctgtgcctcagctccctccctccccacccctccctccttctttctctccttctgaacggggagggcgcctctcctccctcctcctcagcctcccttccctgcgccgcctgggggaggcctccccctcccccgctaatcaaaggctccgttatctaattaacccattggttctgggcagccgaggaggcagccgaggaaggtcgggggaagcgggggaggaaggttgccggctgggctgcccaagaaaggggggtggttgggccgtgccaagccggagcctcatggcacacagacagcctcgttggctgcatgaccgggctgggccaccactgaccccctcgcccccacttccagccaaaaccccccagcttcacaccccccactgggtctaggcacacaatcttgcccagcgttttcctgcagatgcccctgtaccccaggaactcctttgaacccccaccatgccacacagcctttactccaaccctgatataccacacctgatataccggcactggaacctgcgccctgcaccgtcaccccgtcccgtggctgagggccagcccctctccatgccacaaaggcccccacccctagaggaacccctctcccttggaccttagccagatcctgacatccacctcctgacacacttctgcaaaatctgcagggcagccacgttcattcattcaacttatccgcccatccatccgtccatccatccgtccacccatccgtccatccatctgtccatccatccatccatccatccatccatccatccattcatccatccgcccatccgtccatccatccatccatccatccatccatccatccatccatccgtccatccatccgcccatccgtccatccgtctatccatccgtccttccatccctccgcccatccatccacccatccatccatccatccatccgtccacccatccatccttccatccatctgtccaacaaatgtctacccagtccctgctatgtgctagacactagcccaggacacccatgggccacaaaaggcacctctcgagagtggggcacattggtgagtgccgagaggcctgggtttgagtcctgactctgctgccacttcccgtgtaacctcgggccggtggcttattctcccaagctgcagttccctccactgtgaaacagggataatgggagtatctgcctcctagggccactgtggggattaaatcgctaaatccttggtaaagagttctgtcttcacaacatatgcggaatcagaccccagaatcagaggatctttctccccacgcccaggctacttccctgacctggctcccatctccctcttgaacgattacagtgtcctcccctccagcctccccatttctgccttcacccccactccccgtgcgttccccacgggcagcgaggggtatcctgtcaacaccccatggaccctgccccgcctctgctccacagccttccacagctcccgtcccactcagagcagagatgaggacttcagttttcaggtctccactctccaccccagctcctcctctgacctcatcgcttccctcctccccctgctcactcgctgtttccagaacaggccgtgcacaccccggccccagggcctttgcacctgctcttcccttttcctggaatgctctttgccggttgtccacagggctcttgccctgctctctatcaggtccgtgctccaatgctaccttctcagtgaggccgtcctgaccgccccgcatcaaacagcacccctatccctctccagaaccttctctgtttcctttttctccatgacatttatcagcatctgagcttttatatgggtccgtgcgcttgaaggcaagtttcccgagggcagtcagtttgtgactatttggttcccaggacccacaacagtgctgggcacatggcagttgctcaccaaacactgggtgcagggacggatgggtacgttatcatcactgtgagtctatttccccccacgctcacacacagatacccccactctccgttctgcacaccgagccaggccgcactgcaatagctgcacaatgcaggctcccagccctggacaccctcggtccccaggtccccttccatcccaggaggcctgctggcagaggcagcaccttttttttttttttttttttgagacagagtctcactctgttgcccaggctggagtgcagtggcgcgatctcagctcatggcaacctctacctcctgggttcaagcaattctcctgccccagcctcctgagtagctgagactacaggcgctcaccaccaccccggctaatttttgtattttaagttagaatcgggggtttcaccatgtgggccaggctggtcttgaactcctgacctccagtgatccacctgccttggcctcccaaagtgctgggatgacaggtgtgggccaccgtacctggccgaggaagcacacatctcacgtcagctggacaccaatgtcccgggtcaccctccatgccctgggtcaccctccgtgccccagcaccacccggatggctaagtcccagatactacacctcaggttccaaacaggaggtccccagcgcagctccgtgcacccagaggaaagctaccactctgcccaaacctcagataccacctgcgtgagctacactcctggatacagctgcatactgagagggcacctggccccagttgtccccagatagagccctctgacctggataacaggaatgctggctaacctcatctcttccgcacacacatctgacttgcgtgaactcactgaataatgacaccaccaaaggtggtaacgtccaacacacatctggcactgactgggcaccattctgggagctttacttgcattagccaccgcagttcacatcaaccctctgagagaagactgctattacacccagttcccagctagcaaagctgagacacacagaggtactgttagttgcctaatgcgaaacacacggctaggaagtggcccctcctaggtcagccttgccagagtccaggggccccaaagacccccaagtgtggcctgacagcagcaacaattcccatggaggctgcctgtgtgtggggggcagggtgcaggcaaggccacaggcatgctgaacagccacccttcctcagcccctgcagtcacccgcactgcacaggatatcacacgcccgacaccccaccacggcttcacgcccggctggcagaggctccatggactgccctctgcccccacgcacccctagtagtgatgggaaatactgattacatgtgggtgccatgctatccactcctcaagctgctggcttctccccacggccctgggaggaagggatggttcttgtgcccattttacagattcagaggtgagcggcacttgccaaaggttacacagccctccagcagcacagccggcattggaaccccagtcccagaacttagccaggtcaccacggttgcctctcccaccgcagctgccccgggagaggacccatcacaagggtacacctgttctcctccctcacctggtgcaaggaacaagccagaggtgcagacacagaaggaccccaaagaggagaagtacgaggggcagagagtggcagagtcacagggagacagacacaggcatacaaaggggcatgaaaggggcaggaggacaggaggccccgagatggagctgagatccaggcgaaggcagaggctgggagggcccgggcactcgaggcgtgaagctgagtcctcaccggcttcgccatcctccccagccccagctctgagagatctcgggcactgtgcctgggaggattcaggcagatggcagatcggaaactcggggacccaggagaggcggggtgaggagaaatgggaggcagggaacgttcctgtcaggcgcactcattttttggggtggggtggggggctaaattcagacggccagagggaagataggaaattgactaccattgcagcaagaggcctggaggttagagctagagaagaacttccccactgcgagggactggggcagaagtggagcctggagcccagagggtggagagggattgaagccggggagggatgagcccttctgtccctggaagccggtcctatgggagagacccgggttctgggggaggggacaggcagcgctggcgttctgagccaatccatgtcctgaatgctttcaaaataaaagcagccccacagcgccgagaattgtcaggcttctatgtctggaggtagaagaaccttagggaaagggcagtccaggccccctaggagctgctgatgaggaagcaggactaggggcttggctcagctcacgaatttcccgggccactggccactgggcagcaggaccaacaggcggcccgtgcagtgggggtgcagtcggggtgggggtgaggtgcagtgggtgggggtgaggtggtgacttgcttggaggggggctgtcctttcccgtgcagccacgccgctctcccccaggctcctcccacccaccaggcgcctcccacccaggctcttcccatccacaccagacccgttcccctgaggggactttgcccctgctgtgccctcggccagccgggggtgctcttcctggggtcagggggggctctgcgttcccacgacacctccaggaggtcttctttgagctccccctaccgtccgtatcccttgcacttccttttcttcacagctcgtgtcacggccacccagcacctgatgctcggtgatttgttcctgcgttcattgcctgccttcctgctaagaggggagcccctgagggctttgccgcggcgtccacggctgcatcctcaaggccggccaacggcgctggcccctccgagcctcagtatttgctgcaggaacgagcgagccagcgccccctaccggcagttcctctgctggcacccgaggcaaggagccctgggtctctagggaggcaagtgtgggggtgggggagccgtccgagggctaagtgagagggcgggcacagggtgggccccggaacgtccaggagggaagccgggaggagggaatgtcgagctgttacagaggccgtggcaatgggccgggggcgggggggccctccttcctctcacaacgggctgtgacaacagaggggcaggctcagctctggtgggtgaaggacccctctgagtggactggagcggcgcggctggaggccagggaggagctgcgccaggggtccgggggtagaggatgaggccgcggctggagccacggggatggagagaagggaaagagtgaacagataaagcaaatttgtaaaagtggcagaacctggaggcggtgtaggaggtgagggagagggaggagccaggctcttcttatagatctggggtcaaattccaaaagccagaagaggatgtggggcgggaagcagttacggggagaagagaatgcaaaagtccctgccacaggccccccagccccaatctccactcacaggcggtgcctcgctctggtcacacccacagggcagcaggggagctggggacacaccgcccacccggctcccgtccagtccctggctgtgccactttgggccagctgcagcctctctgatgatgctgcatggggctgtggcaagggggcccaagtagggcctggcacacagcaagtgaccagcaagtgacatataggactcggagcctggctggaagccaggaaaagcagaaacctgggctccgaccccccggtgctgccaattttccgctaggaacagtaccctgtggccactcagtttcctcatcagagaaatgggaattaacagcaggtttcagaagagggctgggagggctgggtggggggtggtggggacccaggaagggctgaggtgagctatttaccagccagcggaggactacacttgacccttgaaggacaggggtttgaatcgtgtggtccacttatatgtggactttctcctgcctctgccactcctgagacagcaagacaaccgccccctcctcctgctcacagcctactcaacgtgaagacaatcaggggagcccgttacgatgatacactccacttagtggctagtaaatgtattttctcttccttagcattttctcaataacattttcttttctctagcttactttattgtcagaattcaggatagaatacatttaacatgaatgtgttaactgactgtttatgttattggtagggtgtccaatcaacagaacactattaggagttaagttttaggggagtcaaaagttacaggcagattttcaactgcacagggggctggcacccctagcccccaagttggtcaggggtcaactgtatacatacacacacacacacacacacacacacatacacacacacatacatacatacacacacacacatcacacaaatttctgctggagtgcagtggcgtgatctcagctcactgcagcctccacctcccaggcccaggtgatcctcccacctcagcctcctgagtagccgactacaggcgtggaccactacacccggctaatttttttgtatttttgtagagataagcttttgccatgttgcccaggctggtctcaaactctcggcctcaaacaatcctcctgcctcagcctcccaaagtgctggattataagcgtgagccacggcacccggctgtatttcaatatatcaatgcatcactgtcaaacagactctctgcaatgatgcaaatgttctctccgtgctgtccagcactggtggccaccagccacacgaggctacggagcacgtgacgtatgtcgagaaggagcagggactgaattcttcattcgacttgatgtgactgttgctgctcatgcatggcagtggctgtggcagctactgtgttggacagcatggatctaaccactgatcctgcttggaactgcttctgcctgagtccctgaagtgccgctccgtctgctccttggccctgcccagctacctcacagggctcttatgggactcatggagaagccagggagatcacagctggagaaatggaatgttatggagagtctgaggcctgagcacctgaccagcgctgccttggttgcctgtgccaggcctgcgctgcgggagctgcctgcaagagctcattcagtccccgcaaggggcccatggcgagagctgctgctgcccattttacagaagggcacactgaggcactgccatacccatggatagccagatttgggtaggctttgagataaaaactgaacttccaaaaaaaaagaaaaagaaaaagaaaaagaaaagagggccgggggtggtggctcacgcctgtaatcccagcactttgggaggccaaggtgggcggattacctgaggtcaggagtttgagaccagcctgaccaacatgctgaaattccacctctactaaaaatacaaaattagccgtgcctggtggcgggcgtccataatcccagctactggggaggctgagaaaggggaattacttgaaccgaggaggcagaggttgcagtgagctgagatggcgccactgcactccaacctgggcaacagagcgagactctgtctgaaaaaaaggaaagaaaaaaaactgaacttccaggtccctggactgtgattctgtgctgggatggggcggcttaacacccctgaactgaattcaccccagaagagaactgggccctggcctggcattggtggtttttacaacagtatttgttgccaaggctcaggcagtggggcgtgagagcgagtttgcaggttgggaggggcgtggcccccgccagctccactcataggggtcctgcctaggaaggacgctgatccgatctgttttctctcacagggttgtgcatagttattttgtttacaacaaaagggtgctgctaaaagtcataaaaagctgaaaactatgtgaactggagcaatgcttctcagacatgaatgtgtgtccagctgtctgggaatcttgttaagaggcagattctggccgggcgcagtggctcacgcctgtaatcccagcactctgggaggctgaggcgggcagatcacttgaggtcaggagttttgacaccagcctgaccaacatggtgaaaccctgtctctaataaaaatacaaaaattagctgggcgtggaggcacctgcctgtagttccagctactcgggaggctgaggcaggagaatcacttgaacctgggaggcggaggttgcagtgagccgagatcgcaccactgtactccagcctcggtgacagagtgagattctgtctcaaaataacaataacaataacaaaaaactgcagattctgcatcgccatatctagggtgaggctgtcattctgtttcccaggggatgcaggtctcacagcaaggggctgaagggtctctaagtgcccatctcactcctatattccatttcgggatgaagaatgaagccccctcctctcctctccggagctctgtataggggtgtagctcaaggtgggccttggaatcaactagacctgggtttgaacctcagctgccacagttactagccatgttggcttgcaaagggagcttcacccctcaggacctcggtctgctcacctgtaggtggggaaggtctgatatctgtgatgagtttagggaaatgcctggggcataaaaggaaaatgctcagtgaacttattccaggatccagaagatcctccttctcctcgtctacctcatcacaccgtcctgtgaagaggaaggatggagaggtggaaagagtgttggtgttgaggaaaactgggttgaaactctggctggccactttctccctgtgtcccccgccccaggctccgccttgcagtctgtgaagataatgacacctattaatagcttgttggggttcctggagaccatgtacagtgcttgacacttaagtgacagctacattaaaagttatcatttattctcggccgggtgcagtggctcacgcctgtaatcccagcactttgggaggccgagacgggcggatcgcttgaggtcaggagttcaagaccaggccggccaacacagtgaaacccccgtctctactaaaaatacaaaaaattagccaggcgctgtggtgcgtgcctgtaatcccagctactcaagaggttgagacaggagaatcgcttgaacctgggaggtggaggttgcagtgagcgaagatagcaccactgcactccagcctgggtgacagagtgagactccgtcttaaaaaaacaaaaaacggtatttattcttacgggtcagaagaacaaacagttttcccattccatgactcagccccctccccacccaaccccgccacttctctgccattgtaaatccagcatttctggctggatcaaaaccactcatctgtcaaggagtggggggcccatgggatcacatttggggtctttgcccttcccgcaacaagatcctacaacccccacgtcggtgagggctgattctctactgtgagaatcagcatggggagtcctttcccttctggtgcttgagaggcataaacaagattgagaacctgacagcccctaagttatagcagcttcaatgccttcaaaagtctagacttgttggccgtggtggctcatgcctgtaatcccagcactttgggaggccaaggcaagaggatcgcatgagctcaggaattccagaccagcctgggcaacatagtgagaaccccctctctacaaaaaatacaaaaattagctgggtgtggtggtgcacgcctgtaatccctgctacttgggaggctgaggcgggaggatcgcttgagcccaggaggtcaaggctgcagtgagctgtggttgtgcccctgcacttcagcatgggtaacggagcaagaccctgttctcccccaactccaaaagtctaaccttctatgagtgtattgttattaacaacctaattattgtgattattaacaattttatggccgagtgcagtggctcacacctgtaatcccagcactttgggaggctgaggcaggtgggtcacttgaggtcaggaatttgagaccagcctagccaacacagtgaaacggtgtctctaccataaaatacaaataaataaataaataaataaataagccaggtgtagtagtgatgcgtgcctgtagtctcagctactcaggagcctgaggcaggagaattgcttgaacccaggaggcagaggttgcagtgagccgagatcgcgccactgcactctagcctgggtgacagagtgagaccctgtctcaaaaaaaaaaaaaaaaaattgaatttccacttttagggcccaatggaccagtgcattctcctctcttggcctcagtttccccctctgtaaactgggagtctcatggagggaggcgacctgcagggcggcccacaccagggtttggagtcccggctctgccatttctaggtgtactattttgggcaagggacccacctctctgggcctcagtttccccatctgtcaaaccagggatgatgactgtgcctccttgcagggttgcctgaggaatacacggaaaaaatccacataagagactgagcactgagcctggctcgtggcatgctctcaatcagttagctacgatcatggtcatctccagctctggagagagggtttgaggcaaggggagggccaatctcctctgcgtttaccccctggggctggcctctgcagtggagctgtggctgcacagccttctgacctttgttgtagtgtttgaacaagaactctggggcctaagctcaactccctgggctggggcagcatctggggggcacagtgagcctgggagtggctggggctgctgccccctcctgccctgcctcactctcttcctcctctccatccagggtttttttttttgtttttttttttttggcgatggagttttgctcttgtcgtctaggctggagtacaatgggcatgatctcggctcactgcaacctctgcctcccgggttcaagcgattctcctgcctcggccccctgagtagctgggattacagactcacaccaccacacctggctgattttgtatttttggtagagacggggtttcaccatgttggccaggctggtctcaaactcccgacctcaggtgatccacccgcctcagcctcccaaagtgttgagacggcgtgagccaccatgcctggcctgtctctgtctaggtctctcaacctcccaccaggatcccagatactaccagacaccccccattctcactctcagcagccctcctggggaaacagcagtcccctgggctcccgcctgcctcccgcagtgagcccccatcagcccctctcgtgggtctccaaggcagcccctccacctctgcctgccatgacaacagttgcgcgtgggtttccaggcaacaaggggcatcctgccactctccttactctcctgccaccccctgtctggcggagccagcccagcctcaggaactgggactcgaagggaagggaggttctccccagtggggacaaagggtctccaaactcagagttaatgaggtttcccgtaccccaccagagaggacacaaagacgtgcccccttcacccagcaagggtgatggtggaggggatgctgctgggcttgagcgctgccaggcacagaggggagccctgtcctttgcacccctatctggaggtgaggccctccctccagaaacagcgtccgcatcccaggtcctctaaggcagcccctgctctccacctgctctggggccaaatgtgcagcctggtgtacagagaagcccaccccctgcctacgggctgtgatgccacatgctggggacaagagtgtggggtctgtggcccaccccagccatcagccagctgagaaggacaggctgcaacatggtgccttcacgcaacgctgactttccaacactgtgaggggctggcagtttcacagcagatcctggtcctggagaatgggcgtgtgctctgcgtcctggcagtcttaagaaccacttctcccagagaaggataagactcttcctgctctcggcaagggaaggaggccatttaagtggaaacagggcccagtcaaagtgaggcttggagttagggcaaactgatggggggatgaaggaggaggggcagagagaggacccggcaagggaaaccaagggaaggagagtggagagggtgacagggcacaaagagatggagcagagaggaagaggagcaaacagcagaggttgcaaactcctctgtctatggagcccagcagggaagatgatcccgatgctggttagaggggagagtggggagtggtggccctttgcacctgagcacaacccacagttatccagggggaagacgattccaaaagctgacagtctagatttttatgcaaaatctctaatttaaaaaatgttggcaacaaattaaacatgttgaaagcactgggggaaaataaccctcttgggccgcccggaggaccccaggtaagtgagtcctcagggatgtggggagagggagccacggggaaggagcaggggaggcggggaggcagacaggctggcaggaacagcagcagaggtgagggcgagtgacacagagggacaaagaagggaggcacagagagcggtgtcgagcagagacagaaatagaggcaggtttcacagcagatggggtgggagagggaaagactgatgaatgagtccacagactagacggatgggccaggtcagcaagacattgggggctgggagggcaaagggtcagtcccagggaagatgaggggagatggagaggcgagacggcttgacagagacaggaggtccaggtgacacctcgagacagatgcccggccagagagagtggggtgagaagggatgaaatgcagggagagaggatggagagagagaaccagtgtgagctacacagcaggtgtcctagcaggtgagacaggtgattgagggggtggggaccctggcaagaaagcagggccagggttccggaagggactgaggattcagcggccacccccgcccccaatccccaacccacagcacctctgcctgaagatcggcctctctgcatgggccctgagggtgtgtgtgcaggcacatgtgtgcacaggctctgcttgtgagagatgccagcgccctctgatacctgatgtcttaattctgctgacctctcggacggcgaggaggtccctgaggagccccgtggcgagaggaacactctcagggctgtctctgagtgggattaagggtgactgctggatggggctggccctccctgcagtgcacacacgtgcctccgacgctggcactcggtttggtgtgtgcgccacagtgcacagctctgtgactgtcttagcggcacctggggctgcatctctgtagctctggggccacctccgtgccttttgccttgtgtctgtccgtaggcgtgaggccacgaggccacaggaccacaaggcaagggcctcctgcctttgtctctccctccaggtctgtgtacgaaggactgtgtgtgtctctgtgtgacacacgactacaggtctggggactgctccctgtctctcctgaccactggctgactgagtgtgggggctgcgtctgcaactgggcctctctggttccatatcggggtctctggctgccagtgaatgactgtgtgctctcgtgtgtgtgtgtgtgtgtgtgtgtgtgtgtgtgtgtacctgccaggggaatctttgcctccacgtgccccgtgtcttcctcgcacgctcccactctctgtcgctgacttgctgacttggggtccctctgacaagtcagaagcggcctctaatcccccagaactctggtggccagtgtcccccggctccctgctggccccagcaggcaccccgcgggtctgtcccaccctccctgagtctgtggctccctgcgtctctgcctcacccgcgtgtctgctctctgggtgggagtggcgtgtgtccccggctccccgactctttctttcggaaattaagtgagtaactccgtgactccgtgctgatgccctaattgcctgtatgtgtgtttcggaggctgggtcccttctctccctctgtgcctccctccctggctcccactcttcccttccttgggtctctctccccgcctttcggcggcttcactctctgtccctcatttctctgtgtgcgtttggacaatccggtggccaggaggagaggagccccagggaggaggaggaggaggaaggtgggaaggcgaagtggaggctgcggaaaggcaggttagaaggcgaaggctgcggaagatgctacaggaagagggaggtgcggtcctggccgcggtccgggggtggggggcgggagttttcaggctcctggaccaggagggaagccggctccggctactcccagctgcctggagcccgagttcctgtctggcggctgcgcggccgggacttgggatgtgaggcgcatagcaatggggcgctgcggaggcgccactgcagctcccagctggagaggggggcggggagggggccgaggggcagccccgaggctcccttccccctcccccttcccagctgggctctccccaggggaattccccaccccgacagaaagtcaccagaggctgcggggagggggcagggaggaggggagggcgcctaggaggagagcagaggtgaggaggtctggggaaggagatgggggtgcagagaggaggcgaaggggtggaggggtgggcaagaggccatcctgggctctggagactcgagtcctggagagagactggctgggcccctggcaggacaggaccccagggaggcaggggcatagagatggggggaaccctgagagcccgggattgatggtgagttggaaggagaggctcccaaaaggagagagctaggattgggggggtctgagactggggagtactatggggtgaggagacaacgatggagggggtctctgggtgatgaaaggtcatagaaggatgtttcagagagtgatgggctaaggagaaggcgactgggggtgttggggagaaaggggagaggctggggtgcaaggcccaaagaggggcggggagggagtgggaggagggagctagaggagagggcggctgaagtgagggtctcctggacagaaggtctggagagggatatctgggggattgtcagagatgggggttagagaaggctgaggagcagatgccgtgtcttagaaggtcctagaagagcaggtgtgagggtcggaagcctggggaggaggcagcaaatggggggcgggggtctccaggaggagaggtttccaggaggggagggcggagggaggtgggagaggcagtggtcctggagagacacgtgcccaaggatagaaggccccaaagcctagtggggtcagggaacgggggtcttggagagacggaggggcaggggtccgagccgcccaccaggagaggcggggtgaccccagagggagaagggctgaagactggggagggggttgtctcactccccaatcaccccctccgtctttcccattttcacttcccaaactccccggttctccccggttgccacggcaaccgctcttgccaggcgcggtcaccaaggaaaccccgtgcccgcctctcccccctccccatcactggcgtgccccccccaccccaagcagcagcggtgtggagggtgggaggggccatggggagaggaagaacctggactcccgccccagaaaggggggcccggacctacgcccggagagccccccaccctaagcctacttcctcagccccacagctggatacgcagcgaccgccggacgcaccccccacaacctgtccccaggcagcggcgacaaccaccccccccacagcacagaactcgccctgcccggagaacccccacccagtcgcctcccccaccggcttctgcctcccattaggccccgccccctgtcctctgccatccccccccatcccggaggaggcctaagaccactgtcccccaattagcgaatgccccccacccaccccccgcggttccgcctccggcccccgcccccgacccgtgccccttggcggctactcacagcgaggagaggggttccttccggggggcagcatgcccggcccgtggggggaggacccccccaatgaggctcaggaatttggggtgcaaggcccgctgcggggaggcgcggggggcggggctgcggccgggcctggagcctctcgcgctctcccccctccccggctcctgggtggggagggggcttccgcagcggcggcggtggggctgggggggccgctctgcctcctcgcctcgcgcccgcctgccgtccggccccgcgccctcgcccgccgcccgccttccttcttgccttcctttctttccttctttctttcctggcttccttccttccagccttccttccttccttcctccctcctcgggcccgccggcgccgctctccccccaccccacccccccccaggccccggccccggccccggcccccgcctcggacggtgcggcagcgaccgagagcagccgagagcggcggagacgggagcggaatactgatgatggtgggagcgggcgggcggagggagggagcagggagggaggcccgggaggagaggaaggggggagagagggaggggagggagggcagcgtggagagggaggaaggaaagaggggggaagaaccggagaggatgggagagggagggaagaaaggagagggagacgggagggaaggggaagggggggaggaaagaagagggaaggggaggaaagaaggaaggaagtgggaagggggtggaagaaagaagagggggagaaaaaggggaggagcaggggagagaggagggaaaggggagagggtgtgggaggggaggggagaggagggggtaactcctgcaataaggtcctggatgaaggggaggggagggcggggggcagggggagtgggtagaggaagaggaaaggagggagaggaggagtggagggggagatgggtagagagatgggcaggagaggcccaggggcagggaagtgaggggaaagaggaggtagggaaggcctaactttgagggctgcaggggacagaggggcctggagggcggcgggggctgtggggagaagaatggggggtgcggtgtgcgttgtcaggaagagcaggggaagctggcaggacccggaagaggcaggaggatctaagtgggacagagatgagaggatggaagagggagggaaggacccgtcggggggaggggggaggagaaagatctcgggggagaggagagaagctggggagctggagctttgagggcccaagactgggtggcaagagcccggggagtagacagagtgggggaggggacagagggcctttcttgaactccgctgtatgcccgcttcgtccgcccctccacctcatgaagagaagaaccttcaaacccattttccagaagagaccactgagctcttggaggagccaggatggggtttgaatgcagtcttgggctgggggtaccctgagggagatggagaatgggtcagttcctagctttcgtccctggtccagacttggcaggtggaggcacctgggaggggcagagggcacagcctgcagcctccctactcactctcctctcacctcccccaggtgttggcagcgggtgctggggacgcatttagagctgtgaagctgagctgcatcttgggtgcagggagggggagggcagatgcagaggcctctgggaggtcaccgtgaccctcccctctacctccccggtccactaccccaaaagcttgggccccaaggaagggggacatcgggaatcaggggcggagaaacccagaaggaggggtggcccctgtccaggacactgaagatccttccagatgttaaaattagcacagaagtttcacccctgccttgttatcccccaaaacgctgactaataactgaggactcaggagagagagaagaaagatgaaggttccttctttcagtgccaggggacccgggacagactctccctcttccccttctcctcggagagccccagggagggaaagtgtggctgtacccctgcaggcagagcctggggagagtcagggttggaagctggaaggaaagtgggccagacacatctataatgagccagggttcccgagagaagccaggtcacagatgggttcggaagaggcggttttgggtgggcgctggtgggtgctgagccctgagagctgccgagaggggaaactgagaaggggctgggcgagggccagggagtggcaggtggctgtggtgcttcgggtttcacccgcccctggcgccgctcaagtctagttcgtgagactggaccagtgaatgtgtgtgtgcaccagggtccagcacagagtaggccaggaccgatggtgataccagcaaaacagaatcacatggtggcagcccgcggttcctcctggtctcccacaggccagatgctgtgcccagcacctcacaagcgtggcatcaatcctgcaaccatgcggtaccaactcctagggatggtggtacctggtgggcacaggtgagagcaggcccctgatgagccctgagttaaccctttcattacaagagggtctcggccgggcatggtggctcgcacctgtaatcccagcactttgtgaggccgaggcgggaggatcacttgaggtcgggagttcgagaccagcctggccaacatggtgaaaccccatctctactaaaaatacaaaaattagccaggcatggtggtgcgcgcctgtaatcccagctactcgggaggctgaggcacgagaatcacttgaactcgggaggcctccagaggttgcagtgagccgagatcacgttattgcactccagcctgggtgacagagcgaaactcagtctcaaaaaacaaaccaagagggtctcaggtgagaggccaagccgtgtcaggtggggccgttagagaagcagggaagtattccaatatttgaacaaccagcgaaccctcttggtccatgcagcctaagtctcagccctgcctggagggtatgactgcccctgttttactgaaggagaaatgatttgccgtcaacctccagagctcatcaagggtcttcagcaccgggcactgttcagggctttgagagcccggccggagaacagtaaggagacagcccctgtccccgtggaactgacccctcaaggtcctatttccaagagcagtgtgagcaatgaagaaaataagaggacaattagggaggagagaagttggtgggcggtcaggaggacagacttgaggtgatcaggggaggcctcctggaggaggtgtcttttgtggcgaggccaaaataaggagatagctcattgcgtgcacaggggcaagcacctggggcagaggcccccagatggcagcaagccgggcccgtttgagagatgggagccagataggtgtggcgtggaggaagaagagaagcagagtggaaaaagatgaggatgcggccccaggtttggctcaaacacaaaaccaaatcttaacgcttcccactgtcccctaaaccttgccctaaggcttaactctaatctcccactcaggtgactgtcctgagcaactggaacactgatcctcagttttgattcatgttgtcaacatggattggggactctgatgtcccagaaatggtattaggtaagagacagggacagtgaccctccacagtaatgagtgctcaaaggtattttcaccatttcaaaaaataaaaccaaaaaacaaaaacagacaaaaaaaaaatggaagttgtacatttccttcgggatgggatttcagaggttaaatttcaaatttctttgcttcaggctgtaaaaaaaattatccactcagtgtgttcactgcctgtctcaccccaatcagaagctatgatcggcagtttggtatacctttgataaataaaatatgggaaaatgaatgaacttttcacttaatgtagtttggtttgctcagaaaaatctctcaaagtgggactcatgggggacaatggctaaaggaatcacagccactcagatgttcctgttatttagttccacacagttgcactggacaactcccaggcacctttcacctgggctgtgatataacaagactgccacccatgataggaagctatgggaaggtggctcgcaccaccatgggtgctaagctgcttggccttatgccttaccccaattctccttttttattttttttgagacagggcctcgctctgtcacccaggctggagtgcagtggtgcgatgttggctcaccgcaacctccacctcccattctcgtgcctcagcctccgagtagctgggactacaggcgtgcacaaccatgcccggctaagttttgtatttttagtagagatgggggtttcaccatgtcggccagactggtcttgaactcctggcttcaggtgatcgcctgcctcagcctcccaaagttctgggtttacaggcatgagctgctgtacccaggcccttagccccaattctgaccatcactaactgctatgatctgaatatgttcccccaaaattcctatgttgaaacttaattgccaatgtgacagtattaacaggtgggtcctttatgaggtgattaagttgcaaggatagagccctcatgaatgccattagtgactttatttatttatttatttattggagatagtctcacgctgtcacccaggctggagtgcagtggcaagatctctgctcattgcaacctctgcctcccgggctcaagcagttctcgtgcctcaacctcccaagtagctgggactacttgcccctgctaccaagcccagcttttttttttgtattttagtagagatggggtttcaccacgttgcctagggtgtcttgaactcctgagctcaggtaatccacccatatcagcctcccaaagtgctatgattacaaccatgggccaccacgctcagctgcattagtggctttataacagaggtttggccaggcacagtggctcagacctgtaatcgcagcaatttgggaggccgaggtgggaggatcacttgagcccaagagtttgagagcagtctgggtaatacggcaaaacccataaaaaatacaaaaaattagccagtatagtggcatgtgcctgtagtcccagctactcaggaggctgagatgggaggatggcttgaacctgggagttgctggttccagtgagctgagatttcaccactgcactccagcctgggggacagagtgagatcctgtctcaaacaacaacaacaacaaaacaacaaaaaaacccagaagtttgagtgagctatattcccttttgctatgtgaagacacagcaagaaggcaccatctatgaggaacagctcttctccagacactgaatctgctggcgccttgatcttagaattcgcagccttcagaactgtgagagaaaattcccattgtttataaattacccaatctaggctgggcgtggttgttcacacctgtaatcccagcactttgggaggccgaggtgggcggatcacttgaggtcaggagttcaagaccggcctggctaacatggtgaaaccccatccatctctactaaaaatacaaaaattggctgggcatggtggcaggtgcctgtaatcctggctactcaggaggctgaggcaggagaactgcttgagcccaggaggtgtggaggttgcagtgagccaagattgtgccactgcactccggcctgggcaacagagcaaaactctgtctcaaaataaataaataaataaaattacccaatctaaggtatttttctgtagcagccccaatggacgaagacactgtgcctctattccaaaccctaaccctcactgttaggagagatgagtggccactgaaatagaagcacagagctgggtgctccatcctcacagcatggtaacatccctattgcccgcttgtctggtttccagaacgtctgtatttgtcctgagtcagtgtgacaggctacatttcctgaagatagctgtaatcatcgccccgtccctcaggctcttcttacgatgagactgacactttcccctgtctcatcccatcaaagtgctgattggcagtgaggtataccttgataaataaaagcccttgaaaccgggagggcttttgtgactttttcacccaatggcctgtggccgccaaaaagatgtagcttctgttttatttgctaaaatattaactccagcctttggcagctctatgagctgactgactgccccgaggtagttacgccgtgaggcggctcagactaacctgatatagttgggtatttttttatttttttttattttttgaggcggtgtctcactctgtcacccaggctggagtgcagtgatgcaatcatggcttaccacagccttgacccaaggggttcaagtgatcctcccacctaagcctcccaagtagctgggactataggtatgtgccaccacacatgcctaatttttaagctttttgtagagatggggtctcactatgttgcccaggccggtctcaaattcctgggctcaagctgtcctcctgccttggccactccaagtgctggcattacaggcatgagccacacctggccaagtttagatacttgtcccttccaaatctgatttagaaatgtgatccccagtgttggaggtggggcctggggggaggtgtctgggtcccagaggcagaccccctcatgaatgtcttggtgccattcctgcagcaatgaatgagttcttgctctattagttcactgaggtctagttgttaaaaagggcctggcgcctccctcctcactgtcttttttgctccttctctcaccatgtgacataccagcttcccctcgcctttcaccctcttctatgattgaaagcttcctggctgggtgcagtggttcacgcctgtaatcccagcactttgggaggcggaggtgggaggatcgcctgaggtcaggagctggagaccagcctggccaacatggcaaaatcccatctctactaaaaatacaaaaattagccaggcgtggtggcatgcaccggtagttccagctactcgggaggctgaggcaggagaattgcttgaacccaggaggtggaggttgcagtgagccaagatcgtgccactgcactccagcctggatgacagagcaagactccgtcttgggaaaaaacaaaaacaaaaacagagcatcacttacgacgttttcttgccaagagcatttaaagtaaatctaattaagccccaagacctatggttcccaaactagatgccaagacaccctggggggactacagcaaattcatagcaggccacagcagtgccatgcaggtaaacgtttaccagccggttctcaacattcgctagagaagagtcgtattttttttgcttctgtttgcaaagccaccattcgctggctccagcacacaactggttacagcatctttaaatttttcaagtgaaacacagtgatagttgacatctctcagacaccaccatgacctcatggcttgggacagtccacagtttcaacattagattatgctacatttgggggatgatattatctctgtaaagctgagtttttggcagttccatgattaaaagcaaccactacctgtttgtggaacaggaaaggagggtggtagtgtccaatctgattccaaagtgtgataggttgtacagtgcccaacaggtgcgtatacccttttagtaagtaatcagtgccctttaagactgaaataaaggccgggcacggtggctcatgcctataatcccagcactttgggaggccaaggggggcagatcatttgagaccaggagttcgagacaagcctggccaacatggcaaaacccgttggtgaaaccccgtctctactaaaaatacaaaaagtagccaggcgtggtggcgcacgcctgcagcctcagctactctggtgcctgaagcaggaggatcacttggaccccagaggcggaggttacagtgagccgagattgcaccactgcactccaggctgggtgacaaagcaagactctgtatcaattaaaaaaaaaaaaggatgaaatacaatattttttctttcaatttgtgtgcattactttttcaactggtgctaagttgctagaacataatacttcttaagttgtgtgaacataactgcttaataacggccaccacgtatttctttttgggtcagggacaccatgagaaaatgactgaggtgctgtgaactgagaatgtgggggatcctctgcacgagctctcttgtccatctacaggaattaggagagagaaacaagctggaagacactgcgaaggaacaatcaggcaaatctagaatgtggggcattctaggagacaaccagcctggtccctccaaaaagtccccatgatggggcagagaaactggctggagtggttgctctaagttaaaatagattaaggagatacaaccaccacatgcagtgcttgagccttgcttggatcctggtttgcaacatttcttttttctttttttttttttttgggagtgggggtctcacttttttgcttaagctggagtgcagtggcacaatcatagctcactgcagcctccaactcctgggcttaagtgagcctcctgccacagccttctgagtagcggggattacaggcaggtgccaccacacctggctaattttttgttgttgttgagatggagtctcgctctgttgcccaggctggagtgcagtggcatgatctcagctcactgcaacctccaccttccaggctcaatccattctcctgcctcagcctcccaagtagctgaaactgcaggcgcacaccactatgcctgggtaattttttttcttttgtatttttagtagagatgaggtttcaccatgttggtcaggctggtcccaaactcctgacctcaagtgatctgcccgcctcagcctcccaaagtgctgtgattacaagtggcagctactgcacctggctaatttttaaacctttttttttttttttagagatggggtcttgctatgttgcccaggctggtcttcaactcctggcctcacgtgatcctcctgccttggcctctcaaagcactaggattatagatgtgggccactgtgcccagcccatagtatgttttaaaagtcctaaaatacaatgtctggacaagtgggataatgtgaatttggactcgatcttagaagcactagggaattaagtttactcttcttgggtgtgatatgatataatattgtagttatgtaggagaatgttcttattcttttctttcttttttttttttttatttttgtttttgagacaaggtctcactctgttgcccaggccggagggcagtggcacagtcttggcttggtgtaacctctgcctcccaggttcaagccatcttctcttttcagcctcctgggtagctgggactacaggtgtgcaccaccatggctggctaatttttgtattttttgtagagtttcatcatgtttctctacattgcccaggctggtcttgaactcctggccacaagcgatctgcctgtctcagcctcccaaagtgctgggattacaggcatgagccaccacgtctggcctagaatgttcttatcttaggagattcgtatggaagcatttgcgtctgcaacctcttctcaaatcattcagcatctcaaatattaacaacgatggaatcaaagcggtgggcatatggatgctcaatgttttttcaactttctggatatatgacatttctcataaaaaatttgggggagattcatctgagagaagtcacatttagggcaggttgttgcttgcaattaaccactcccctcctgcataaacgcttttccctgtctgcaccagcatttaagatttccccagtatctcccatcttaaagaggaaccaccccatcatgccctcctctgacacgtctccctgcagtgaccgcccacttctcttgttcttctcagcaaaacttcacaaaagctacctctccttcttcatctcatagtccctctgcaaacaccagctgggcttctgcatcccacttccgaccaagctgtccttgtccaaggccaccaatggcctccgtactgcacactcaatggccacttctctacccgcatcccagtcttccacttggcagcactggccacagaacctcctggaaaccaatgtcttttcatggcttcagtgacttcaaaccctccctcactttcctcctctttcacctggctgagccttctgggacttgtctgccagttcccctcctttgcttgctccctaaatgtgggaggaaagccactggatcccagccctctttgtgctctgttctctacccctaggtgacccagttctgtggctttaaacccagacagccgggccgggcgtagtggctcaggcctgtaatcccagcactttgggaggcagaggcgggcagatcacttgaggccaggagttcgagaccagcctgaccaacatggtgaaaccctttctctaataacaatacaaaaattagccgggtgtggtggtgggcgcctgtaatctcagctactcgggaggctgaggcgggaggatcacgtgaacctgggaggcggaggttgcagtgagccaagatcgcaccactgcactccagcctgggtgacagagtgagaccctgtctcagaaaacgaaacaaaccaaacaaacaaaaaatccaggcagctgatgactccccagtatgggtgtccaactctgaactctgcgccgagctcctcctgcaggtatacaaatggctccttgacatctcttcttaaatgtagcggccaaagttgggctcctgactcccggcccctgcccacacacacttgctttgcttccagtcttccttatctcagtaaactgtaccatcctccactcagctgttgacttcaagacgtagaaattgttctcgatggcactcttttctcactccctctgtccagtccatcatccagtgactctacctttaaaatacatttccaagtatcccttcttttcatcccttctggcaccacggtagcaaaagccaccatcctctctcccatggccgactgaaggcctcctccctggccttactgctttttttaattgttgttgtttttgtttttttgagatggagtctcactctgtcgctcaggctggaatgcagtggcgtgatctcggctcactgcaacctccatctcctgggttcaagctattctcctgcctcagcctcccaagtagctgggattacaggcacctgccaccacgcccggctaacttttgtatttttagtagaggcggagtttcaccatattggtcaggctggtcttgaactcctgacctcaagtgacccacccatctcggcctcccaaagtgctgggattacaggcgtgagccaccatgcccagcctagccctattgcctttgctcttgcctccctacaatccattctccacacagcagccagggtgaaacttgctgaaaaacataatcagggccgggcgcagtggctcacacctgtaatcccagcactttgggaggccgaggcgggtggatcacgaggtcaggaggtggagaccatcttggctaacacagtgaaaccccgtctctactaaaaatacaaaaaaaggccgggcgcggtggttcacgtctgtaatccagcactttggaaggccgaggcaggcgcatcatgaggtcaggagatcaagatcatcctggctaacacggtgaaaccccatctctactaaaaatacaaaaaattagccgggcgtggtggtgggcgcctgtagtcccagctactcgggaggctgaggcaggagaatggcgtgaacctgggaggtggagcttgcagtgagccgaaattgtgccactgcactccagcctgggcgacagagcgagactccgtctcaaaaaaaaaaaacaaacaaaaaacaaaaaaaaaagtagctgggcgtggtggcgggcacctgtagtcccagctactcaggaggccgaggcaggagaatggcgtgaccctgggaggtggagcttgcagtgagccaagattgcaccactgcactccagccggggcaatagagcaagactccatctcaaaaaaaaaaaaaaaaaagaaaaacgaaatcagatcacattaacctccaacttaaaatactcggaggacttctcactgcatttgggattcattcctccttcccatgactgctaaagtcctgagcggtctgggccttgatgctgccccaccctcacctcccacctctccccactccagcttctccaggacagtgtgctcattcctaccacagggccttggcacctgttcctctctgccggaacgctcttctcccacatcgtcacatgctggcttccgattttcaggtttcagttcaaatatcacctcagaggggccttccttgtcctgctgatttagagacactctcctacctgttcttggtaactctttgcaacacaattgtgttctgttttcttcacagctctcattgataactgaaattttcctcttttcttttgcttccttccttcctttctctctctctttctctcttttttctctttcttttctttctctttttctttctttctctctctctttctttctttctttctttcttcctttctctctttctttctttcttttttgagacagtctccctctcttgcccaggctgaagtgtggtggcgccatctcggctccctgcaacctctgcctcccagcttcaagcaattcttgtgcctcagcctcctgagtacctgggattataggcgtgtaccaccacgccaggctaatttttgtatttttagtagagaaggggttttgtcatgttggccaggctggtctcgaactcctgacctcaagtgatctgccctccttggcctcccagaatgctgtgattacaggcatgagccacggcgcccaggctgaaattttcttcgcttctttcctttctactcactgtcttccctcacttgaaggcaaactccatgagaacaaggacctggtctattttcagtgatgactacattcccagtgtctggaaaatgccaggagaactgagtattttcatggaatttgtggaattttacatacaatccatgcaggcttctctgcactttaaatacctttcctgaaacagaatcatccttccccataacaaaacattaattgttcttgttggtctgccatgcatgagataagtgcttggattacctctgaccccaccaacaatcctgcaaggaaggtgctattaatatcctcctctccactttacagagaagactcaagtgcaaagagctgaggtgcttacacaagaccaccgcacaggaacgaagcgtcggagtgtggaatcgagacctgttctactgcactccagagcacatgttctttctactctgccataatgtttgggacaaaattgaatcatgagggtttttttcttccattacaaatgtaacacatcgctcctgcgtacggctgggatgagtcactggcaccagacgtgccctcctgcaaaaaacagctatgaaactggacaaaatacaggagggccactgttttcaggcgttgaacagtggaaagaggactgcgatccttgagaagagacgatggtgaaggtgagcccatgtgttggcccaggttcctcactgggagccctgtccctaccacagcacagagatacggggctaaaacaatgcagttgtttttttgtgttttctcttctcttctttctattatctttttttttttttgagaccaagtctcgctgttacccaggctggagtgcaatggtgtgatctcagctaaatgcaacctccacctcctgggttcaagcggttctcctgcctcagcctgtcaagtagctgggattatagactcgtgccatcatgcctgggtaatttttttttttaatttttttagtatttattgatcattcttgggtgtttctcggagagagggatgtggcagggtcatacgataatagtggagagaaggtcagcagataaacacgtgaacaaaggtctctggttttcctaggcagaggaccctgcggccttccgcagtgtttgtgtccctgggtacttgagattagggagtggtgatgactcttaacgagcatgctgccttcaagcatctgtttaacaaagcacatcttgcaccgcccttaatccatttaaccctgagtggacacagcacatgtttcagagagcacggggttgggggaaaggttatagattaacagcatgccaaggcagaagaatttttcttagtatagaacaaaatggagtctcctatgtctacttctttctacacagacacagtaacaatctgatctctctttcttttccccacatttcccccttttctttttgacaaaaccgccatcgtcatcatggcccgttctcaatgagctgttggggacacctgcagaaaggctgtcacttcacacttggaagattgcacagcggccaggcagaggcactcctcacttcccagacagggtggcggccgggcagaggggctcctcacttcctagacggggtggccgggcagaggcgctcctcacttcacgcctggataatttttgtatttttagtagagacggggttttgctgtgttgccaaaactggtcttgaactcctggcctcaagggatctgcccgtctcagcttccgaaagtgttgggattacaggcgtgagccaccgtgcctggcccagagcagtcttactgagccgaggagacagagagagggctctgggggctgctgacaaggctggaatttgcaggatagggcagtggggaaaagggagccgcatgaggtgggcccccagaagcctgtgtgtagttcaccataggtccttggctaaggactggacggtgtctgcagaggacaagactccatgagtaccagtcgggggtagctgctacaaagatgagagatgaacagaaataaaagccgtcatgcagcgctaggagatgagtctccagcccagccagagtgggagggcctcactaagctcctgggcactcagctgaaagctcaggaaggccatgctttaggagtaaggccctgacttaatattctgttgagtggatacagcatggttaatttaaccattcctttctagttggatactctggtaattttatttttcaaaaactaggcctggcatggtggctcatgcctataaccccagaactctgggaggctgaggtgggtggatctgttgagctcaggagtttgaggccagcctggctaacatggtaaaaccccgtctccactaaaaatacaaaaattagccaggtttggtggtgcgtgcctatagtcccagctacttgggaagctgaagtaggagaatcgcttaaacccgggaggtggaggttgcagtgagccgagatggtaccactgcacccatccagcctgggtgacagagcaagactctgttcaaaaaagaagtaaaaataaaaaataaaaataaaggccaggcacagtggctcacacctgtaatcccagcactttgggaggctaagatgggcggatcacctgaggtcaggaggtcgagaccagcctggataagatggcgaaaccctgtctctactaaaaatacaaaaattagctgagcatggtggcacgcgcctgtagtcccagcttctcaggaggctgaggcaggagaatcgcttgaaactgagaggccgaggttgcagtgagccgagatcacgccactgcactccagcctgggtgagaagagcaagactccatctcaaaaaaaaaaaaaaactattataaaatatcaccatgaacctctttgtaagcttctgactttcaggtgaattcccaggcatgggatattttcagggtatggacattgttcctgtatttgacacctttcaccaatttgctttccaaaattgtggcaatttaccttctgacaactgagtatcagcatgcatgtctgtttggctgcactctctctagcatttggtagaagcttaaaacatttgttgctcatttgatgggcagaggaaggaatcactgagctgttgtaatgctatgcctttgggctttataaaaggaactaaatgaaacagttaatgtgaaaattgctttagcttctgcagaaaacttttgttaatgacccagcaattcaactcataggaacttatattcaggaagtcatcagagaggtagacaaaaatatacacacagagatgtatctcatagaatcatttattatagccaaatctgaaaaaaacttaagtgttaatggagtacatgtgatctggggatgctgctttacctgtagcctgttttcatttcactcctaagttatttatttattttatttatttttatttttattttttatttttagagacagagcctcgctctgttgcccaggctggagtgcagtggcacaatctcagctcattgcaacctttgcctcccaggttcaagcgattctcctgcctcagcctccagagtagctgggactacaggccggtaccaccatgcccggctaatttgtgtatttttagtagagatggggtttcaccacgttggccagactcgtctcaaactcctgacctcagatgatctgcctgactcagcctcccaaagtgctgggattacaggcgtgagcttctgtgcccggccctgccatattattattattattattttgagacagagtcttgctctgtcacccaggctggagtgcagtggcacaatctcagctcactgcaatttccacctcctgagttcaagaaatcctcccacctcagcctcctgagtagctgggactacaggcgcctgccaccacgcccagcttatttttgtatttttttgtagagatggggttttgtcatgtttgccctggctggtctcaaactcttgggctcaagccccctgggctcaagtgatccagccgccttggcctcccaaagtgctgggattataggcataagccaccatttctggccactcctgccttattgactaataattttattattattattattgttattgagacagagtctctgtcacccaggctggagtgcagcggtgcaatcttagctcactccaacctccacctccttggttcaagtgattctcttgccttcgtctcccaagtagctgggattacaggtgcccaccaccatacccagctaatttttgtatttatggggtttcaccatgttgcccaggctggtctcgaactcctgggctcaaatgatctgccctcctcagcctcccaaaatgctgggattacaggcgtgggcaaccacacccagccactcctgacttattgactaataattttattatttttatttttttgagacagagtaacctataattttagcacttgggaaggccagggtgggaggatagcttgagcccaggagtttgagaccagcctgggaaacatagggagacccccgtctctgcaaagaatcagaaaaattagccaggcgtggtgatacgtgcctgctcaggaggctgaggtggaggatctcttatcggtgacaggctcttccacctggtactttccctctacttcgtgctgcgttttggctgacaatagccttaagggagaggaaatcaatatatattccccccataggactggcaaaaccaaagttaactggtgtagtaagcattgatgagatgggctgggccagtggctcactcctgtaatcccagcactttgggaggccaacacaggcggatcacttgaggtcaggagttccagaccagcctggccaacatggtgaaatcccgtctctactaaaaatacaataattagctgggcatagtggcaagcgcctgtaatcccagctacttgggaggctgaggcaggacaaccgcttgaatccaggaggcggaggttgtggcgagctgagatcgcacagctgcactccagcctgggcaacagagagaggctcagcttaaaaaaaaaagcactgatgaggatgtgggggaacaggtcctctgtcccattaccagcagaaagaaaatcaggctgggctcagtggctcatgcctgtaatcccagaactttgggaggctgaggcgggtggatcacctgaggtcaggagttggagaccagcctggtcaacatggtgaaaccccgtctctactaaaaataccaaattagctgggtgtgatggcgggcacctgtaatcccagcaactcgggaggctgaagcataaggagcagctgaacccgggaggcggaggctgcagtgagccaagatcgcgcctttgcactccagcctgggtgacagagcgataccctgtcacaaacacacacacaaaaagtgaaaatcagtatgtctaccaatggttccacacccttgccacggcctcatcgtgtatgtggggtgcttccttgccctttaactctgcacagttgacttgacttgacttgctttggccaatggcatgtgggtggatgcaccagcgtctgagtctaggctttcagaagccttgcatctgcctctagtccgcttgtgccccagccgtcaccacgagacgctctccctggcagcctaccttctctcaacctgggccccagaatgagatgcttggagcggacctgagccagccagacctgcagcttcaagcagagcagccctagaaaagtctggctaggccgggtgcagtggctcacgcctgtaatcccagcactttgggaggccaaggcaggtgaatcacttgaggtcaggagttcaaaaccagcctggcgaacatatagtgaaaccctgtctctactaaaaatacaaaaattagccaggcgtggtggtgcattcctgtagtcccagctacttgggaagctgaggcaggagaatcacttgaacccgggaggcggaggttgcagtgagccgaggttgtgccattgcactccagcgtgggcgacagagagagactgtctcaaaacaaaacaaaacaaaaaacaaataaacaaaaaagcagaaaagcctggctagatcaagaacacatgaagttgctgagtttttggtatttgttatgtagaaatacttgacagttccaggaattgtttattaaaattaaaatgaatacattcatataacttgataattctaactctccttattagacatgtctccaaggaaactcatgtaaagatgttcatagcaacattgtttgtaaaagcaaagaaaccaagaataacccaaatgtccagcaagaggagagcggacaaagaaacgccgagttctatggaatactactgcagcttttaaaaggaagaggacaagctctttaaataaatctggatagatttccaagacatattgttgagttaaaaaagcaagctgcagaacaatatgtacagtaggatcccatttatgttaaaagacactcatatgcttgctcaaaacaatactactcatttactatacaatactatgcatatactctattaccacacacgcacacacatgcacacacatgcatgcacacacacacatgcagcatgcactcacttttagacaaagatccagaaggatcaaccataaaccaataatcatggttacttccagagaagagatgtagatgagagagaggtgaccaaagggaattttagctttgcctgtaagctttttttaagaagcaaggaaagtctatctgtatattatttgtacaatttaaaagtaattttccttttctttttttttttttttttgagatagggtcttgctctgtcacccagactggagtgctgtggcatgatcatggctcactgcagcttcaaactcctgggctcaagtgatcctcccatctcggactcctcggtagctgggactacaggtgagcgccaccatgcccagctaatttttgcttttttttttctgtagagatggggtcttgccatgttgtccatgtcggtcttgaactcctgggctcaagtgatcctcccacctcggcctcccaaagtgctgggattacaggtgtgagccgctgcgcccagcctaaaaataattttgtaaaaggaagaaatatatatgaatatatacatccatgcatactatgaatataaacatagggccttattttaaatgtcctttgtggcagacaggcctgaattcaaatcctgctactgccaccagctaactgtgtcactagacaagtccattctttcacttggaacctctgtttcctcatatgtaaaaacggggatactcatttatatttaatagggttgtcatcaaagtaaattataatgtttgtaaagttccaagagcaggctgggcatggtggctcacgcctgtaatcccagcactttgggaggctgaggtgagtggatcacctgaggtcaggagttcgagaccagcctgggcaacatggcaaaaccctgtctctactaaaaatataaaaattagccgggtatggtggcaggcgcctgtaatcccagctactctggaggctgaggcaggagaatcacttgaaacccggaggcggaggttgcagtgagccgagatcgcatcactgtactccagtctgggtgacagagtgagactctgtctcaacaaaaaaaaaaaaaaaaaaaaaaaaaaaaaaaaagttccaagagcagtgtctgacaaccagtgtatgttcaattaaatacgaattctttcccttccacttcccagtccctgctacccctaaccttgctcctaagccatgagtcatgctgtggtgactattttgtaggtgcctccttagcacttacattccctagggtaggcggaataattactccccaaagatgtcctcatccccagaacccgtgaatatgtttgattacatagcaaagaggaagtaaggcagctggcggaattaaggttgctaatcagctgacgttaagatagggaaagtaggccgggcgcggtggctcacgtctgtaatcccaccacttcggaaggccgaggcgggcagatcacaaggtcaggagatcaagaccatcctggctaacatggtgaaaccccgtctctactaaaaacacaaaaaattagccggacgtggtggcacacacctgtagtcccagctactcgggaggctgaggcaggagaatcgctcccagaacccgggaggcggaggttgcagtgagccgagatatgctgctgcactccagcctgggtgacagagcaagattccatctaaaaaaaaaaaaaaaaaaacgttagggaaagtatcctggagtacatagacatgctctatgcagtaagaatccttccaagtggaagagggaggccagaaggaaagaatcagaaaaacatgtgggacaatggaagcagggttagaaaaatgctacactgctgactttgaaaatggaaggtgctatcagccgaggcagcctttagaagctggaaaggacaattaaacagattttcccctagagcctccagaagaaatgcagtcctgctgccatcttgattttagcccagtgagacccatgttggacttctgaactacggaactgttaagataatgaatttgcactagatggcggggctcgttggctcacgcctgtaatcccagcactttgggaggctgaggtgggcggatctcctgaggtcaggagttcaagaccagcctggccaacatggtgaaaccccttctgtattaaaaacagaaaaattagccaggcatggtggtgggtgcctgtaatcccagctacttgggaggttgaggcaggagaattgcttgaacccgggaggcagaggttgcaatgagctgagattgggccattttactccagcctgggtgagaagagtgacactctgtctcaaaaaaaaaaaaaattgcattgctacggtagcaacaaaaaacaatgcaactttgtgtgtgtgtgtgtgtgtgtgtgtgtgtgtgtgtgtgtgagagagagagagagagagagagacagggtctcaactctgtcacccaggctggggtgcagtggtgccatctcagctcactgaaacctctgcctcgctggctcaagcaatcctcccacctcagcctcccgagtaactaggaccacagacatacacactaatacgcccagctaatttttgcattttttgtagagatggggttttgccatgttgcccaagctggtccgaaactcctgggctcaaatatccacccacctcagcctcccaaagtgctgggattacaggtgtgaccaccacacccagcccaatgcaacctttgattcctacaaaggcatctctatttttggtggcagaaacacctttctctccaaatagcccatgtgtccttcctggacatatctctttggatacactgggtcctctcagcttcagacagaggactcaggcttggttaatcagagaatttacaatctctggccatactgactggttcatggatggtcatgtgagcaaaactgggccaaagcagagaattaagccaaagttgctaagggggttggatgtgagcctgataatactgatggtcatatttccagcatgagggaacagcttatgtgaagcgaagccagtcagagggaatgaggactcagagatgcagaggcacattccccacgacatcgtttgagtgcttggatctagtcctgcctgaagttctaggctagccatgacttttcagctacatgagccaatacattcaataaatctcccacaattttttttttttttgagacagaatctcactctatcacccaggttggagtgcagtggcacgatctgagctcactgcaacctctgcctctgaggttcaagcgattctcctgcctcagcctccagagtagctgggactgcaggcacgcaccaccactcctggctatttttttgcatttttagtagagacagggtctcaccatgttggtcaggctggtctcgaactcctgacctccaacgatctgccgacctcggcctcccaaattgctgggattacaggtgtgagccaccatgcccggccatgaacctccttcttaaaattcagccaatttgaattggggtctgtcttttgcaagtggactaatcctttgagaatctgatgacagctataaattttttttccttgagaaaaacgcatgtggacaaacctttatatacaatttcagggaaacttttgacccctgaagtcaggccccagcttatgaagtcctgctgtgttccaggctgtatcgccagcaaggcatcaaaaaggagagaagagacagagtatcttcagggagcccaggatgcccagtccttctctccaatcctgaagaggagttttgatataggtcataaaccactggatcaaggaatgaaaggtgggagttctccgcgggaggcataaaaaggctctttgcgatcactgcactcagcctctttgagagaatctctcagccctacttttggaatctactgattccaatctacttttggaatctaagagcctctcttggatctctttcctggattatgattatatttctctttcccctctttccacacttggaagaacccaagatcagagtgacacagtacgtgcccaagatacacagcaaagatatgaagcgggttttgaattctggcctcgttagctcttttacacatagaaggtctttctttttctttcttttcttttcttttttctctctttcttttttttttttttgaggttaacagtggaggtttaataggttaaagagaaaagctctctctcctgcagagagggaggggctcccaagtgggtcatctggttccctggtgaaatgaactgggttttataggtgagcttgggtaggtggagtgtgatttacatagaggatgagagattggtgggaccaggtatgccatttgcatagcgtgccgagggaatcttttattatgcagatgggctctctacctggccagcaccatgttgcctgctctttttttttttttttttttttttgagatggagtctcgctttgtcgccaggctggagtgcagtggccccacctcggctcactgcaacctccacctcccgggttgaagcgattcccctgcctcagcctccccagtagctgggattacaggtatgcaccaccacacccggctaattttttgtattttggtagagacggggtttcaccatgttggccaggatggtctagatatcctgacctcatgatccacccgcctcggcctcccaaagtggtggggttacaggcgtgagccactgcgcccgacctacctgcttctttactgcacacgtggtcgacaaagaaaaggaaagatggagcctccatgttgaacatgcctggtccccaggtagctttttcctgttggcacagctgcctgcattcacctgagcaagctcctagcttgctttttatagagagtgtttcaatggcttccctcccctcttagaatacaaaagcaggatctcactgtggccaccgggccttataagatttgtcacttgtctctctgccctcgtttggagtccctctcaccgtcattcattaggctccttccagccatgttggttttctgtctgtccctcaaatgtgccaaacatgctcctttgtccctgctcctccctgtgcctacagccgatgctggataacctaagatgcagaccacaaacatgctcaagaaaccagcaaagtgtgggctcgcccaaattctttcttgaaaaaagtttcatattgtaaagaagtcatcatgggaaaaaacaaaatgtagattccttttttggcctatcatactctcgttgtcagattttggtattaaagttaggccagctggatcttccggctggttgctcctcctcctcctcctccttctttcttcttttccttcccccttccttcctgccttccttctttccttccttcctccctccctccctcccttcttccttccctcccttccttccttccctcccttcttcctcccttcactcttccctcccttccttccttctttccttccttccttccctccttcctcccttctctcttccctccctcccttccttctttccttccttccttctttcctctctctttccctccctccctccctccctccctccctccttcccttccttcctcccttccttccttccttccttcctcctttcttattcctttcttcaagacagagtctcgctctgtcgcctaggctggagtgcagtggtgcaatctcggcccgctgcaacctctgcctcccgcaatcaagcgattcttgtgcgtcatccagcatagctggaatcacaggcaggcgctactgtgcctggctaatttttgtattttgagtagagacagggttttgccatgttggccaggctggtcttgaactcctgccctcaagtgatcttcctacctcccaaagtgctggattacaggtgtgaaccactgtgcctggcctggaattatttcctctttaaatgtttagcaacatttagtgccagtgacactgtatggacccagaattttctttgcggttaatcttttaaaaattactgatttgatttgtttcatggttttggactaactgaatgctatattttatcttgagtcatttttggtaagttatagctttccaggaatttgtccatttcagctatattttaaaatttgttagcgtaaagttgttcttaataaagttccctcttaaaaattcctgatattggctatttgtgcttttttctttctctttttaatcactatcactggaggtttgactatcttactaggcttttcaagtaaccaactttggtgtagttgattatcctaactctatgtttgttttctatatgacttttttcatttttattattttttccatttccttatttttttggatttttttagttattctttttctaactccttgagatgaatgtatttagtgccatgaatttcccttgaagttctgctttatgcattcacgtttaaaaatatatagtttttttttttaccatacagttaaaagtgttttacagcttccattaggatttcttcattgacccaggagttatttaaaagaacattttttaatttgtgagaattttttttttttttttgatgaggtcacactctatcacccaggctggagtacagtggccagatctctgttcactgcaacctctgcctccccggactcaaatgatcctcccacctcaaccttctgagtagctgggactacaggcatgtgctaccaggcctggctaattctgaatttttttttgtagagacagggtctccccatgttgcccaggttgatctaaaggtcctgagttcaagtgaccctcccgcctcagccttccaaagtgctggaattacaggcgtgaaccaccacacccaggacatgagatttttatttattactattattattaatttttttttttttttgagacggagtttggctcttgttgcccaagctggagtgcaatggcacaatctcggctcaccgcaacctctgcctcctgggttcaagcaattctcctgcctcagcctcctgagtatctgggattgcaggcatgccccaccacgcccggctaattttgtatttttagtagagatggggtttctccatgttggtcaggctagtctcgaactcctgacctcaggtcatctgcccgcctctgcctcccaaagtgctgggattacaggcatgaaccaccacacccaggatatgagaatttttaaagttatctttttttttttttttttgaggcagagtctcgctctgtcatccaggctggagtgcaatggtgatctcagctcactgcaacatccgcctccccagcttaagcaattctcctgcctcagcctctagggtagctgggattacaggcgcctgccactaagcccggctaatttttagtatttttagtggaaatggggttttgccatgttggtcaggctagtcttaaattcctgacctcagatgatccatctgtcttggcctcacaaagtgctgggattacagatgtgagccaccgcgcccagcctaaagttatcttttttttttttttttttttagagacagacttttgctctgtcgcccaggctagagtgcagtggtgcgatctctgctcactgcaagctctgcctccccggttcacgccattctcctgccttagcctccggagtagctgggactacaggcgcccgccaccacattagccaggatggtctcgatctcctgacctcgtgatccacccacctcagcatccacccacctcggcctcccaaagtgctgggattataggcatgagccatcgcgcccggccaacttatctttttattattaacttataacaacctacctatggtaatgaccatatttattctgtatgatgtcatgtcaaacatttgaaatgtgttacggcgtgtatatctcattttattgctccttgctttattgcactttgcagatttttctttctacaaattgaagttctgctgtgttgagtctgtctatcagcaccattttaacaacagcgtgtgctcccttaatgtctctgtgtcacattttggtaattctcccaatatttcaaactttttctttatcattctgttatggtgatctgtgatcaatgatttttttttgagatgcagtctcactctgtcgcctaggctggagtacggcggtgcgatcttggctcactgctgctccgcctcccgggtccaagtgattctcccgcctcagcctcttgagtagctgggtttacaggcgtgcaccaccatgctcagctaatttttgtatttttagtagagacggggtttcaccatgttggtcaggctggtctcgacctcctgacctcgtgatctgcctgccttggcctccggaagtgctgggattacaggcgtgagccactgtgcccgggtgatcggtgatctttgatgttgctattgtaattgttttgggatgccatgaaccacatccatatcagatggtgaacttcatccataaatgttgtgcgtgttgtggcttttataccaactggcctttcccttgtccttctccctctccctgggcctcctcatttcctgagacacaacagtattaaaattaggccaattgataactctacagtggactctaagcatttaagtgaaaggaagagtcacatgtctttcactttaaatcaaaagctaaaaatgattaagttcagtgaggaaggcacgttagaagcttagacaggccaaaggcaaggcctcttgcctttagccaaggtggaaatgcaaaggaaaagttcttgaaggacatgaaaagtgttattccagtgaatggctaatcataagaaagccaaacagccttattgctgatatgaagaaagttttcgtggtctggatagaagatcaaaccagccacagttttcccctaagccaaagcctaatccagagcaaggccttaactctcttcaattctacgaaggctaagagaggtaaggaagccacagaagaaaagttggaagctagcaaaggttggttcacgaggtttaaggaaagaagctatctccgtgatatagaagtgcaaggtgaggccaggcgcggtggctcatgcctgtaatcctaggactttgggaggccaaggtgggtcgatcacgaggtcaggagtttgagaccagcctggccaacatggtgaaacactgtctctactaagaatacaaaaattagctgggcgtggtggcatgcacctgtaatcccagctacttgggaggctgaggcaggagaattacttgaacccaggaggcagagattgcagtgaactgagatcacaccactgcactccagcctgggtgacggagtgagactctgtctcggaaaaaaaaaagaaaaaaagaaaaagaagtgcaaggtgaagcaccaagtgctgatggagaagctgcagcaagttatccagaaggcctggctaagataattgatgaaggcagctatactaaacaacagattttcaatgtaaatgaaacagcctacagccttctatgaaaagaacatgccatctagggcttttatagctagagaggaaaattcaatatttggcttcaaagttccaaaggacaggttgactctcattttaggggttcatgcagctgatgactttaatcgaagccagtgctcctttgccattctgaaaattctaaggcccttaagaattttgcagaatctactaggcctgtgctcaaggaatagaacaacaaaacctgaatacaacacatctgtttacttcatggcttactgaatattttaagcccattgttgacatctgctcagaaaaaaatattgtttctttccaaatattactgctcattaacaatatatctggtcagccaagagccctgatggagagatacaagattagtgtcggctgggtgtggtggctcacacctgcaatcccagcactttgggaggcggaggtgggcggatcacgaggtcaggagttcaagaccagcctggccaacatggtgaaaccatctctactaaagatacaacaaattagctgggcatggtggcacgcacctgtaatcccagctactcaggaggatgaggcaggagaatcgcttgagcctgggaggtggaggttgcagtgagctgagatcctgccgctgcactccagcctgggtgacagggtgagactccatctcaaaaaaaaaaaaaaagaaaagaaaagaaaattagtgtaattttcatgcctgctaacacatccattttatagcccatggatcaagaagtaattttaattttcaggtcttattatttcagcaatacacttcataagggcatggctgccatagatagtgattcctctgatggatctcgtcaaagcccattggaaaccttctggaaaggattcaccattctagatgccattaagaacatttgtgattcatgggagggggtccaaaatcaacgttaacaggagtttggaagaagttgattccagctgtcatgatgactttgagagaagttcaagacctcagtggaagaagtcacagcagatgtggtggaaatagcaagggaactggaatttgaagtagaacctgaagattctactactgaattgactgaattgtggcaatctcataataaaatttgtacacatgaggagttgctccttatggatgaggaaagaaagtggtttctttttttttttttctctaagatggagtcttgctctgtcacccaggctggagtgcagtggtgtgatcttggctcactacaacttctgcctcccaggttcaatcgattctcttgcctcagcctcctgactagctgggattacaggagcacaccaccctgctaatttttgtatttttagtagagaaggggtttcaccaggttggtcaggcaggtgtcgaactcctgacctcgtgatctgcctgcctcggcctcccaaagtgctggggttacagacatgagccactgtgccggccaagaaagtggtttcttgagatggagtctactcccggtaaagatgctgtgaacattgttgaaatgacaaacaaaagatttagaatattacataaacttagttgataaagcaatggcatggtttgagaggactgactccaattttaaaacaaattctactgtgggtaaaatgctatcaaacagcatgcatacgtatctatgtttgtatagaacaattggaacatgtcgacatcattcttgaaatatattttcactggctgggcatggtgactcatgcctgtaattctaggattttgggaggccgaggctggtgcatcgcttgagctcaggagttgaagaccagcctggccaacatggtgaaaacctgtctctactaaaaatacaaaaattagctgggtgtggtggcgcgtgcctgtagtcccagctactcaggaggctgaggcaggagaactgcttgaacccgggaggcagaggttgcagtgagctgggatcatgccattgcacttcagcctgggtgacagagtaagactccatctctctctctctctctctctatattatatattataatattatatatattatatattatattatatattttatatataatataatatatataatatataaaatatataatatatattttatatattatatgtattttactggatattaaatatatatattatatatatattttactggatattaaattgacagttattttctatcagcacgttgatcttattctagattccattgttactgatgtaacaatgtcagttgttatgcaaattatttatttttttaaaagccagtccaatttagcagtaagaggttgtataacaactcgcagtgaatttcttttttaagacaaggtctcactctattgccaaggctaggatgcagtggtgcagtcatggctcactgcagccgcaacctcttgggctcaaatgattctcctgcctcagcctcctaagtgagtagctgggactacaggctgtgccaccatgcctggctaagtttttaaaaaaatttttgtagagacagtcttgctatgttgcctaggctggtctcaaactcctggccttaagcaatcctcctgccacagaggcttcccagagtgctgggataactgatgtgagacaccacacctggccctccaactattgatcttttaaaggacatctgtcttttttctctagctgctgatgagatctctttgcctttagtgttctgcaaacatactgccgcgggtgcgactgctggggccggtgtcgcggtcattaaaggaatttaccgagacagtcatagctaaagaaaagcagatttattggagaaagtatgaagatacattgcaaggttgcaatgggctgcacagcaaagaagcggctgtttgcaaagaggcaggggctagagggatgagtttatgctgctgaggttacatgcggagtgaggtatttgggagcaggatgttgtgccagcctgttgtctgtgattagtcatctctcagaacaattgttttccccaacctgggaccccttcctttttgcttacttattttgtcaggactccacgcatattaatacaatgatgtttctaagtgtagatttctttatacttatgattcattaggcttcttgaatctttgaattagattctctcctcaattttggaaaatttgaaaaatccgccattattttcttaaatattctttctgccatattctctttatcccctcttttgggactcagaatatagataagactctctgtcttatctacactccatgccacttaacctcttttacatgtttcctgctttgtctcttatggtgaattgtggataacttctgttgatctatgttccaattcactatgtctctactcagctgttgcttttacttttaatcctcttttagagtttttgtcattttcaaagtacctagataattttttatagtttctcggtcccttgccattgcaaaacaatggcaatcttatattttatatgaacaaaccacactgttttatgtccctctgatagttctaaaatcacaaggattagtgggtctgtttacagtgtctcttatttctgctagttcttgctcctggtactttgtgttcttggttatacctgcgtgctgctcacgttccttgggaaaaaaaaaatatgtttacaggagtaatttgaggcctttaatgaagattattttcaccagagagaattatctgtgtgttgtcatcaagagtttaaaaatacttccacttggggactttaagtccacaacttgaggtcttttggaccacccatggaataggctgccaagtaacaaaccagggccaatttacttctagttcccccttaccctgagggcatagccattgctttctcagctcaatgtggactccccaccttgcttgggccctagcttttttttgttttccttccatctaagaagccatccaaataaaagtttaaatttgccagggttataaaattcccttagggtagaagtactctgattacttctctgagttcccaattttccatcagttacagcctgataaatcctgtgagccttcggtggtttttttttaagttacagaaattcttttagagatagggtcttgctatattacccatgctggaatgcagtggctattcacgagcatattcattgtgcactacagcctcaaactcctggcctcaaggggtcctcctgcctcagcctcctaggtagctgggactacaagtacaggccactgtgccaggccaatgccttcaagatttaaaaaaacgcatccagcatttttagttgcttttagtgggaatgttggtctgaataacctagcctgccattatcagcaacctcaattactctgtcctctcatctttgcttaatttctcttcttagcatttaacactacttgacattatatatttatttgtccaccaactaggctgaaagctgcgtgggtgcatgtactttgtttgctgctgtcgtctccctggcacccacaataatgcctggaaaatagtgaatactcaatagttgttgaatgaatgaatgaaaaaagaatgattttgcttagtgctttgtgccatggctactgtgggccaaagaaagaggactgggggattcagtgtcaagatctttcaaatcacaattccaaatcaaggtcacaacttaaccaaactggcagaaggaacctcaagtgttcttggctttcagtacttcccaggtttaggtactgagctgagtggcaggtctcagctaccgacgggtttgtgggttcccgtcactctctctgggtctttgctcagttcgcctatctttgcttttgtctgttgtcgtcaccctttaccaagtctcagacagctctgaccctctcatttcctttctttgccctttctctctattcatctctgtgactcagtctctgtgtccttatctttctctagtgggtcttgatcatgtacttcccgtcactctcctcccccataagatacaattctaatggtttctgactttgcccgcacccctaatctctagctgcaggatgtctgacaagccatcttccatctacccccgcgtcttgcctcatgacttttctctatcaccccctttttatgttaccatcccttctgtctgacgtcacgctctctgcctttatatcttcaccactctctctcattgaatgaactctgttatgttcatcctggtagtgtcaccacaactgccctccactcagagtctgtgcattctgttgccattccccctggctctgtctcctctcactctgaatcctccatctctgtcccttgcttggcttctgtctcctctatttctgttggagcctctttctctgagttctaccttctatctccgtctctgtcccgtcagcttctgttccacttctctctttgctattctcttttcttttctttctttttgacagagtctcactctgttgcccagacgaggctggagtgcagtggtgcgaacaccacgcactgcagcctccaactctcaggctctagtgatcctcccacctcagcctcccaggtagctaggaccacagatgtgtgtcactatcaccatgcctggctaattttaaacatttttgtagggacacggtctccttttgttgcccaggttggaggacagtggcatcaacatagctcactgcagccttgacctccctggcccaagtgatcctcctgcctcagcctcccaaatggctgagaccacaggcgcacaacaccatgcccagtgaacttttatatgtttttttgtagagacaggcttttgccacgttggccgggctggtcttgaactcctgacctcaagtgatctgcccacctctgcctcccaaagtgctgggattacattcatgagccaccgtgcccggcctgtctttgctatttgccaccagctctctgtgccctctgtgcactcttaatctactattgcttcctgaatctctgatattgacaccattatctctgccccatccatctgagtttgttctctttgcctcactcgctgttgcctcagattttgtctctggcaccatctccatatttgtcacttgtccccgtatcacttctgttatctctgccatgtgtctaacactgtccactatatctttatagcctttgggtctctgtcttctctgtctctatggctgtcaccttctctgtgtcggccacatccccttatctctttctcccctatcactgtcccttagtctctgtcccttctgtcacagtcctccctgtttctattactgtccccttggtatctctcccatcttcctccttcctcttcttcccctctccttctccttctccttccccttctccctctcctctccctctccttcttctctctttctctcactttttctttttttttttttcttttgttgttgttgctttgtgtttttttgacgtagtctcaccctgtcgcccaggctggagtgcagtgacacaatcttggtaaactgcaacctttgcctcccgagttcaagcgattctcctgcctcagcctctccagtagctggaactctccagtagcaggcactacaggcgccgccaccagacccgcctaatttttgtatttttagtagagacggggtttcaccgtgttggccaggatggtcctgaacttccggcatcaagtgatcctcccgccttggcctcccaaagtgctgggattacaggggtgtgccctcgcgctcggccgtctctcgcgtctttcttagactccctgatctctgtcctggcccccgggatctttgtcttcgtcccctctctagttcgctcccagcagattcactgtcttctctctctggtcctctcccctttgcctcggactgtatcctcttcgtcgctgttgatcccactgctgcactgtcctcgctgctgtcttctcacagtcctgtcgccatccccatcccctgcctcagtcccctgtgccgtcggccgctccacctgtgaccgtggagtctttttctgtcacttccgtctctgtcacatcccctctggtcgctcctggtcggaggccctgcctccctcgcctcagggcccttccccgctccttctcttcctgtcatccctggctccttcccagcgtctttccttccttctccgaatcgtcctctgctcctctgggtttgcgcctgctgggagctctgcccctgggagctgtttcctccgctcagtctctgggtgtttcctagggggtcacatgctcttctaggcctgtcctggggcagaggggtcgccctgaggtccatcagtcagtctgaccatctccttcgaacctcgagcctctcgcctcgcctcgcctgacgccctttcccgccctttatctttcccttcaggataaaaaataaaaagagtcggaagcatcagcgcctagggcccaatcgccactctggaacaggtgtgcgcggcgggtccgcgggctggcgggagctcacacgaactcacgcgcgagctcgcaggccgcggcggccggctggcgactagtgacgtcgcaggggcttgtccctgccttactggctgccttcgaccagcgcgcgcttgctggagtagacggccgcgcctttcccagcgccagggggcgctcagcgctagagctcactgaccctgggagccctatggagagactcgtgtcatcctggcaaccctgtcctacctgattggatacctgctgccgttcgttggatccattactctgatcggatgcctggtgggtcaaggcttgtacataactggatgcctggaaatgtggatctaccctacctttggcatgtctctctcttagcgggatatcttccgcaagcactggggatgtggacaaggaaagtaaattgagtctccgttggggagtgaggggtgttggacgtggcacgggaacccggccggagtcagcggacccaattggctgctctctctcagatacagttccccttcctccctccagggggcgccatggaacgcagggccctcactggctctggggactgggtgacgtcaggggtgagcctctcgtgattggctccatcaccctgcgtaagatcaaagggaagaaaggagagccccgacagccggagccattgtggctccggccgattgcgccggccctcgggccctcagggaggcgagggtgtgagggtacagagttcgaggccaacttggtccacattggtaggaaaaaaaaaattttttttatcgttccctatataacaacaaaacataaagggaggacgccttgataggaagaaatgacatcttcctaagtgtttttaaattacttcaatgtatctttttttttttttttttttttttgggagactgagcctcgctctgtagcccaggctggagtgcagtggtgtgatcttggctcactgcaacctccgcctcctgggttcaagcgagtctcctgtctcagcctcccgagtagctgggattacaggcccacgccaccgtgcctggccaattttggtatttttagtagagacggagtttcaccatgttggcgaggctggtctcgaactgctggcctcaagagatctcgccccttggcctcccaaagtgctgggattacaggggtgtgccctcgcgctcggccgtctctcgcgtctttcttagactccctgatctctgtcctggcccccgggatctttgtcttcgtcccctctctagttcgctcccagcagattcactgtcttctctctctggtcctctcccctttgcctcggactgtatcctcttcgtcgctgttgatcccactgctgcactgtcctcgctgctgtcttctcacagtcctgtcgccatccccatcccctgcctcagtcccctgtgccgtcggccgctccacctgtgaccgtggagtctttttctgtcacttccgtctctgtcacatcccctctggtcgctcctggtcggaggccctgcctccctcgcctcagggcccttcccggtctccttctcttcctgtcatccctggctccttcacagcgtctttccttccttctccgaatcgtcctctgctcctctgggtttgtgcctgctgggagctctgcccctgggagctgtttcctccgctcagtctctgggtgtttcctagggggtctcatgctcttctaggcctgtcctggggcagaggggtcgccctgaggtccatcagtcagtctgaccatctccttcgaacctcgagcctctcgcctcgccccgcctgacgccctttcccgccctttatctttcccttcaggataaaaaataaaaagagtcggaagcagcagcgcctagggccgaatcgccactttgcaacaggtgcgcgcggcgggcccgcgggctggcgggagctcacacgaactcacgcgcgagctcgcaggccgcggcggccggctggcgactagtgacgtcgcaggggcttgtccctgccttactggctgccttcgaccagcgcgcgcttgctggagtagacggccgcgcctttcccagcgccagggggcgctcagcgctagagctcactgaccctgggagccctatggagagactcgtgtcatcctggcaaccctgtcctacctgattggatgcctgctgcagttcgttggatccattactctgattggatgcttggtgagtcaaggcttgtatataattggatgcctggaactatggatcttccctacctttcgcatatctctctcttagcgggatttcttccgcaagcactggggatgtggacgtggaaagtgactggcgtctccgtgggggagtgaggggtgttgcacacggtgcaggtacccggcgcgagttagaggtccctattggctgctctctctcagatacaggtcactttcctcctgccaagatgcgccatggaacgcagggccctcgctggccctggggactgggtgatgtcacgggtgagcctgtcgtgattggctatatcgctgtgcctaagaccaaaggaaagaaaggagagcccggacagctggatccgccgtggttcagggtacacgttataggccaacctggtcaacaatgatttaaaaaaaaaattttattgttccctatatcataacaacaaaatataaagggaggaagacttcagaggaagaaattgcgtcttcctagccgtttttaaattacttcaaaaaaaaattttttttggacgaagtcttgctctgtcacccaggctggagtgcagttgtttgatcttggctcactgcaatctccgcctcctgggttcaagcgggtctcctgtctcattctgccaggaggttgggattacaggcacacgccaccgcgcctggctaatttttgtatttttagtggagacggagtttcaccatgttgcggaggctggtctcgaacttctgacctcaagagatcctcgcctcttggcctcccaaaaagctgggattataggggtgaggcaccttgcctggccgtctctcccgtatttcttagaccccttcatctctgtcctggcccctgggatctttgtcttcgtcacctctctagttcgctcccatctgattcactgtcttctctctctggtcctgtcccctttgcctacgaatgtatcctctttattgctgttgatcccactgctgcactgtcctcgctgctgccttctcacagtcctgtcgccgtccccatcctctttctcagtcccctgtgccgtcgggcgctccacctgtgaccgtggggtctttttctgtcccctcggtgcctgtcacaacccctcttgtcgctcctcccctgcctccctcgcctcagggcccttccccgtctccttctcttcctgtcatccctggctccttcccagcgtcttttcttccttctccgaatcgtcgtctgctcctctgggtttgcggctgttggggactctgcccctgggagagagaaatgcgaaacgtatttctgggagctggaagctgtttcctccatttagtctctggatgttttctaggtgaccacagcctcttataggcctgtcctggggcagagcggccaccttgaggtccatcagtcagtctgatcatctctgtagaacctcgaacctctcgcctcgcctcgcctgacgccgtttcctgccctttatctctcccttcagaattaaaaaaaaaaaaaaaaaaaaagacagtcggaagcagcagcgcatgagccccaatcaccactctgaaacaggtgcgcgcggtggcctgcgggctcgcgggagctcacgcgaactcacgcgcgagctcacaagctgcggcggccggctaggcgactagtgacgtcaccgaggcttgtccctgccttattggctgccttcgaccagcgcgcgtttgctggagtagtcggccacgccttgccaatcgccagggggcgctcagcgctagagctccgcgaccctgggagccctatagagagactcgtgtcatcatggcaaccctgccctacctaattggatacctgctccagttggttggatccattactctgattggatgcctggcgagtcaaggcttgtatataattggatgccggaaatttggatcttttctacgtttcgcatttctgtctcttagccggatttcttccgcaagcactggggatgtggagattgaaagtaacttgagtctccgtgggggagtgatgggtgttgggcacggtatgggaacctggcccgagtctgcggacccgattggctgctgtctctcagatacaggtccctttcgtcccgccaaggggggccatggaacgtagggccctctctgtccctggggactgggtgatgtcaggggtgattggctacatcgctccccagaaggtgaaatggaaaaattgagagcactttcccaccagcttcggtggctccatcaggttgtcctggcgcacaagctggcgatgctatgtgtttgaagctaacctgggcaaaattgaaaaaaaattgttttttcattgttccgtcataaagggaggtctcgacaggaagaaattgcgcttccaatagaattgtttttaaattactgcaatatatcttttgagatggagtcttgctctattgcctagggtggagtgcagtcttatgatctcgtctcactgtaacctctgcctcttgggttgaagagagtctcctctctcaccctgaggttacaggcgcacactaccacacttggctaatttttgaattttggcttctttttgagatggagtcttgctccgccgctgaggctcaagggcagtggtgcgatcttggctgactgcaacctctgccttccgggttcaagtgattcatctgcctcagcctcccgagtagctgggactacaggcacgtgccaccacgcctagctaattctttgtatttttagtagagaaagggtttcactgtgttaggatggtctctatctcctgaccttgtgatctgcccgcctcagcctcccaaagtggtgggattacaggtgtgagccaccgctacctggccttttaaaaaatttatttatttatttatttatttttattttgaggcggagtcttactctgttgcccaggctggagtgcagtggcgtgattttggctcactgcaacccccgcctcccgggttcaagcaattcctttgcctcagcgacccagtagctgggattacaggcgcgtgccaccatgtctggcaattttgtgtatttttaatagagacgaggtttccccattttggccaggctggtcttcaactcccgacctcaggtgatccgcccgcctccgctttccagactgctgggcttacaggcgtgaaccactgcgccagcctctttatcccttctatactgcataccccaagttgcaaactgttattagagtgaatacctaggggcaacttggatccttataatggacacctgatatttttgcctgagtgacatctgttatctctgattttcttcttcattaataattttttttggagcagtcttaggtttacaggaaaaaatcgaatgaaaagtaccgagagtttctacatcccccttcatcccttcattgcccctcatcttccctgttaacatcttgtgttactgtgctacgtttgttacaattaataagccagtattgatacattattattagctgaaatctgcagtttacattaaggtccactccttgtgtgataccttgtacagtctattttttttttaataaagtatttttttggtttttttttttttttttgagatggagtcttgctctgtcacccaggctggagtgcagtggcgcgatctcggctcactgcaagctccacctcctgggttcacaccattctcccgcctcagcctcctgagtagctgggactacaggcgcctgcaatcacgcctggctaattgtttgtatttttagtagagacggggtttcaccgtgttatccaagatggtctcgatctcctgacctcatgatctgcccaccttggcctcccaaagtgctgggattacaggcgtgacccaccgcgccaggccttttttttttttcagttttaaaatcacagcaaaattgagaggaaagtccatagtttacattcagtttctctcttagtgttttattgtctatgggtttgaacaaatttataatgacatgtgtccaccattatagtattatgcagagtagtttcactgtcctaaaactcctctgggctctgctgattcatccttccctcctcccaaacccctaaaaaccaatgatttttttttaactgtctctatagtgtttccttttccagaatgtggtatagttggaatcataccatatgtagccgtttcgtattggcttctttcacttaacaatatgcattttaggttcctccatatcttttcatggcttattataactgattaatattccattgtatggatgtactgcagtttgttcatctactgaaggacatcttgtttgcttccaagttttgacaattatgtacagagccgctatgaatatttgtcttcaggtttttgtgtggatgtaagttttgagctcatttgagtaaataccaaggaacatgagtgctgcaatatatggtaagagtgtttagttttgtaaggaagtgccaaattgtcttctaaagtggctgcaccattttgcattactgccagagatgaataagagttcctgacgttcctcatcctcatcagcacttggtgttattcatgttttggattttcaccattctaataggtggttgtcgtatgtcatcgttgctgtaatttgcaatttcctaatgacatttgatgttgagccccgcttttttttggagacggagtcttgctctgtcgccgaggctgaagtgcaatggcatgatctcggctcactgcaacttctgcctcccaggttcaagtgattctcctgtctcagcctcccaagtagctgggattacaggcatgcgccactacgcctggctaattttgtatttttagtagacatggggtttctccatgtcgatcaggctggtctcgaatgcctcgcctcaggtgatctgcccaccttggcctcccaaagtgctgggattacaggtgtgagccaccacgcccggcccaagtaccttttatttatttgtttgtttgtttatttatttattttaagaaacagggtctctgttgcccaggctggagtacagcagtgcaatcatagctcactgccgcctccaactcttagatcctccttctcagcctccccagtagctgggactacagttgtgtgctgtcacacctggctatttttttatttctatttttattattttatttatttatttatttagaaacagggtctcgctctgtcatccaggctggaatgcagtggcactggaatctctgctgactgcaacctctgcctcctagactcaagtgatcctccgacctcacctttccaagtagctgagaccacaggtgtgcaacaccacacctggctagttttttgtatttttcgtagagatggggtttcaccacgttgcctggctggtcttgacctcctgagctcaagggaattaccagctgtggcctcccaaagtgctgggattgcaggtgtgagccaccacatctgacctttttatttttattttttgtagagatggcgtctcagtgtgttgcctaggttggtctgaaactcttggcctcaaatgatcctcctgccccagcctcccaaagtgttgggattataagcgggagccaccacacctggccaactatctttttatttacttatttgccatctgcatatcttctttgttgaagtgtctgttcagatctgttccctatttttaaattgggttgtttgttttcctattgttgagttttagttctttgtataccagctttcttttttctttttctttctttctttttttttttttcagacaaagtcttgctctgttgcccaggctggagtgcaatggcgcaatctcagctcactgccacctccgcctcccaggttcaagtgattctcttgcttcagactcccgagtagctgggattacaggcgcccaccaccatgactggctaatttttgtatttttagtagagacagcattttgccacgttggccaggctggtctcaaactcctgacctcaggtgatccgcccacctcggcctctcaaaatgctgggattacagatgtgagccaccacacctggcctggataccagctttttgtctgaaaggtgttttgaaaagattttctcacaatctatagcttctctttttgttctcttaaacatctgattttcctatcactcctccccatgcaaaatatacattttttaactggatcttgccagggatttcagagtgagaacaagagtcagacctggccaatctgagtgcttcatgaccttggttatgatgtgcagtagtttggatgtatgtcccatccaattttttttttttttttttttgagacagagttttgctttgtcacccaggctggagtgcagttgcacaatcttggctcagtgcaacctccacctcctgggttcaagtgacccttctgcctccgcctcctgagtagctgggattacaggcacatgccacgcccggctaatttttgtatttttaggagagacggggttttcccgtgttggccaggctgccttctaaatttcgttgttgaaatttgatccccaatgttggagatggggtcctaatgagaggtgtttgggtcacaggggtggacccctcacaaatagattaatgccctccctgggagtgtgggtgagtgagttcttcctccattagttcccattagagttggttgttaaagagaggctgacacttgcctctcttgcttcctctattgtcacgtgatccctgctttctttctccttccaccaagagtagaagcagctcaagactttctctgtatgcccaatcttccagccagaagaatcataagccaaatacacctttttctctttataaattacccagcctcgtggatcactttaggtcaggcgttcgagaccagcctggctaacacggtgaaaccctgtctctactaaaaatacaaaaaattagccaggtgtggtggcgggcacctgtcataccagctacactggaggcaggagaatcacttgtacctgggaggcggacattgtagtgagccaagattgcaccactgcactctagcctgggtgacagagcaagatcctgtctcaaaaaaaaaaaataaataaataaaaataaaaattacccagcgtcaggttttcctttatagcaagacaacatggactaagacacatggttactatagaaatggacatgtgacccaagttggaccaatgagagctaaccttgagactttggtatcaccattcaggaaagcagtacctcttttctgctaggttgttaaaatgatagtatggaaactttgagctgctgtgggccctgtttgtcaccgtgagggaagagattctgcctgagaggaaagtcaagatacagaaaagtaaagcccagatgggaaatgagctgtattgctaaagattcattttagtgcctggatccagttatgcctgaagctagttatacagctcggttctataagtcaacaaattccctttgttaaaaacaaaaaaaagccagagtactttccagagagcaaggcttattataataataattaaagcagcatactcttgcgaggaaaaacaaataggccaaaagaacaagacggaaaaatcaggaaaagttcacacatatatggtaacttggtttatgacaaaagcaacatttcagtgcagtgagaagcaaaagatgatctttttgaatcaatagggctgagccagttgatagccatatgacctctacctcacaccatacacaaaaattgattccagatgtgttgtagatctaaatgttaaagcttaaacaataaaacttctagaagaaaatatcatagagtatcttcagaaccttcagggtaagaaaatatttcttttatttacttgtttgtgttaatagagatagggtctcgctatgttgcccaggctggtctcgaactcctaggctcatgtgatcctccctcctcagcctcccaaagtgctgagattacaggcatgagccagtgtgcctggccagaaaatatttcttaaaccagaaacaaaggagccttaactataaaggaaaatgttgataaattggactatattaaaatagaaactgatccttatcaaaaaataccactaagagaatgaaaagagaagccagagagtgggagaagaatatgtattctaacaaaagactcataagaaaaataaagaaagaactactaacctgttttttaaaaaaggcagaaaaaccagtcaaaaagtggacaaatggcgtgaattgacatttcacaaagtagcatattcatatggccaattaatatttgaaatggtgttaaatttctttctatttttttttttttttgagactgagtctcgctctgtctcccaggctggagtgcagtggcgtgatcttggctcactgcaagctccgccttccgggttcacgccattctcctgcctcagcctcctgagtagctgggactacaggcacccgccaccgcgcccagctaattttttgtatttttagtagagacggggtttcaccgtggtctcgatctcctgacctcgtgatccacccgcctcggcctcccaaagtgctgggattacaggcatgagccactgcgcctggcccgaaacggtgttaaatttctttaggcattgggctaaaggtaaattaaaaccataataaaacacggctacagccccaccagaattgctaaaattgaaaggactaacaataccaaatgttggcgagcaactgaaattctcagagactgctagtgggtgtataaatggagaaaattagtttgaaaacctggttggcagtgtctatgaaggatgaacatgaagctgggaatggtgactcacgcctgtaattccaacacttcgggaggcggcagatcacctgaggtcaagaccagcctggccactcccatctcaaaaaaaaaaaaaagatgaacatgcacacaccatgtatacaccctgggacccagcaattacacttctaggtatatacccaacagaaatacagaaatgcctacatatgttcaccaaaattcaatgtatatagcagtactataagtgatcatgccaaatcagaaggcacctaaatgtcaatcaacagtagaatggatacatagattattatgtattcccataacacacttttttttttttgagacaagattgtcctctgtcacccaggctgtagtgcagtggtgtgatctcagctcactgcaatttctgcctcccaagctcaagccatcctcccacctcagcttcccaagtagctgagatgacaggcacgcaccaccacaccccactaatttttgtattttttttgtagagacggggtcttgctatgttgctcaggctggtcttgaactcctgtgctcaagctatctgcttgcctcaccctcctaaagtgctaggattataggcatgagccaccatgcctggctcataacacactcttatacagcaatgacaatgaacaacctccaacaatcagcaactacatggacaaatctcatagacgtatgatgaataaaacaattcaggccaggtgcaatggctcacgcctgtaattccaacactctgggaggccgagatgggcagatcacaaggtcaagaaatagaaaccatcctggccaacatggtgaaaccctgtctctactaaaaatacaaaaaattagccgggtgtggtagtgcgcacctgtaatcccagctactcaggaggctgaggcaggagaatcgtttgaacctgggaggcgaaggttgcagtgagctgagatcatgccactgcactccagcctggtgacagagcgactctccgtctcaaaaaaaaaaaaaaaaaaaaaagagagaattccaacacacaagtctctatgcttgtaggattccaagcagattaagataaaaaacaaggcaaactaacttatggtgtcagaaatcagggtagtagttacttttgaggtaaagaagtgactgacaaggggccgggcgcggtggcttacgcttgtaatcccagcactttgggaggccgaggtgggcagatcatgaggtcaggagatcgagaccatcctggctaacacggtgaaaccccgtctctactaaaaatacaaaaaaattagccatgcatagtggcaggcgcctgtagtcccggctactcgggaggccgaggcaggagaatggcgtgaacccaggaggcggagcttgcagtgagccgagatagcgccactgcactccaggcgagactctgtctcaaaaaaaaaaaaaacacaaaaaagtgactgacaaggagcatgaggggtttggagagctggtaatgttctagttcctgacccagggctggttacccatggttacatggtgtgctcagtctgttatctgatccatacttactgggtatttgtgagtttctttgtgagtatgttgtacttcaataattgtttttttgaaactgggtctctgtcatccagactggactgcagtggctcaaccatggctcactgcagccttgacctcctgggctcaagcgatcctcccacctgagtagctgggactacaggtgcacaccatggcacttggctatttatatatatatatatatttaaagagatggagtcttgctatgttgccaaggctgggtctcgaactcctgggctctagtgatcctcccatcttagcctctcaaagtgctgggattacaggcatgagccaccgagcttggcaataattttttaaaaggccagttttttgtctcttgaaagtggaggagtcttggcaagtccagcaaatggcatatactattttgtttctcttccctcccctttcaagtgagaattgtgattgttttcttgtttttcctccactgttatacacaggggtgggttgctgagggggctacaatttcatttaacattaattttttttttagatggagtcttgctctgtcaccaggctggagtgcagtggcacaatctccgctgactgcaacctccgcctcccaggttcaagtgattcttctgcctcggcctcccgagtagctgggattataggtgtgtgccaccatgccgggctaatttttgtacttttagtagagacagggtttcaccatgctggccaggctggtcttgaactcctgacctcaggtgatccacttgccttggcctcccaaagtgctgggattacaggtgtgagctaccgtgcccagccttaacattaattttcaggatcaagagagactccatgtgcccttgatgaaaggaatagccaatatccagaaatcttggtctgaggattggatgtggctttgggatccctccctttgcagaaggggtgaaagcttctgcagttgcactagagatagttatgttaggtgggagtattagttttagccaactttatcaaaatataatttgtgtacaagaaaatgtatcaatatttcaaaaagatatttgcaacacactttcatagcagcattatttacaatacccaaaaggtgaaggaggcaacccagctgttcatcaacaaataaatggttcgacaaaatgtggtatatacacataatggatttttttttttgagatggagtctcgctctgtcgcccaggctagagtgcaggggtgcgatcttggctcactgcaacctccgcctcccaggtttaagtgattcccctgcctcagcctcccgagtagctgggactataggcgcctgccaccacgcccggctaattttttgtagtttagtagagatggggtttcaccatgttgaccaggatggtctcgatctcctgacctcgtgatccgcctgcctcttcctcccaaagtgctgggattacaggtgtgagtcactgtgcctggcccataatggaaaattatttaaccttaaaaaggaaggaaatgctaacacatgctacaacatgggtgaagcctgaggacattcatgctaagtgaaacaatcccatcacaaaaagacagatgctgtatgattccacttacatgaggtacctagagtagtcaaattcatagggaatttcccagagagtagaacgtgcttcccaggggctgggaagggaaggcagtgggagttgcttgatgggaacagtttcaattctacaagaggaaagagtggagatgagtaggggtgatgattgcacaacaatgcaactgtacacttaaaattggctaagtcctggggaggtggctcatgcctgtaatctcagctactctggaagctgaggcaggagaatcgcttgaaccggggaagtggaggttgcagtgagccaagatcatgccattgcactccagcctgggcattgcagcgagactccgtctcaaaaaaaaaaaattggctaagatgataaagtttgtgttatgtgtattttgcaacaatgtacaagaatttaaatgaaccaattttaagcgcaatgaattttgacaaatgtattcggttgtgtgatcacttccatcatccggaaagtttccctgtgtccactagtaatcagtctctccataaccactgccactgcccccagtcaaccactaatccattttctgcccctgcgtattagccttttcttttctcttttcttctcttctcttcttttcttttcttttactctgtcacccaggctggagttcagtggtgtgatctcagctcactacaacctccgcctcccaggttcaagccattctcctgcctcagcctccaaagtagctgggattacaggcactcgctaccacacccggttaatttttgtatttttagtagagatggggttttaccatgttggccaggctggtcttgaactcctgacctcgtgatccacctgccttggcctcccaaagtgctgggattacagggtgagccactgtgcctggcctctggcgtctttctttctttctctttcttttcttttcttttcttttttctttctttctctctctctccttccttccttccttccttccttccttccttccttccttccttccttccttccttccttctctctctctctttctttctctcttttttgagttggagtctcactctgttgcccaggctggagtgcagtggcatgatcggctcactgcaacctccgcctcccgattctcctacctcagcctcccaagtagctgggattacaggtgccaggctgcttttgaacttctgatctcaagtaatccgcctgcctcagcctcccaaagtgctaggattacaggcgtgagccaccatgccctgcccatattagtgttttctttctacagtttcacaaaagtggaatcctacagcatatacccttgtatctggctgtatcacacggcatcatgtttttgagatgcagggcagcagtgccatcacagctcactgcagcctcaaactcctgggctcaagtgatcctcctgcctcagccaccagagtagctgggactacaggtgagcaccatcatgcctggataattttattattattattattattattattattattattatacctggataattttattattattattattattattattattattattattattattactactactactactactattatttgtagagacagggtcttgctatgctgcccaggctggtctcgaactcctgagctcgagcaatactcccacctcgacctccaaagtagctggaactacaagtgaacatcaccatgcccggccaatttttttttttttttttaagagaatctcaccatattacctggtctcaaactcctgggcttgagcgatcctcctgcctcagcctcccaaagtgctgggatttacaggcatgagccactgtgcctggtggttactaccacattgacttcagacttctggcctccagagctgtgagagaataaatttctgttgttttcagctaggttattgtaacttgttacatcagtcctagcaaactgacacagtgattggaccaatttttgcagtgggagtttttgaaatgttgtgtcccggaatgtagatgtgaattagtgtgaagtagctgagggtagaatgtagtggacacctactgctttgagggactgtcccttgcccattgccgtgtgattcacttggaactgtcagtcaagggacccctacatatatggcttccaggagatgaattcatccctccagcaaaaagggatgaggtgcagaggggctttggaccaatcctgggcaagatgggcaggggaggaggaggaggagtcagcaaaggcaggaggcgggcccaagagtaggctccaaactggacccaatgattggcccggggtgtctccaaggtctgcgctggaccaatcagaatcctgttcctgaatgacacagcagctgggagccagctgattctcacattgtttcctctgaagttatctgctctgaaggcaattacaagtcctgttaatttcttgcaatggcagcagatcctgttaatttcctacccaacaatagttcccctccccgtgcttcctctaggcaaagcccgcaccccaccatggggactggaaatgacagatgttcactacccagaccgctttgcaactcggggtagccacacagccgggttctggcaagagagaaataaggagaattattctgaggaggaaaaatggggaacacagaaggggaggccccggtctacactgcctgatttagatgccagtgtgtgaaaacatgatgctgctatagacagtttgtactcaggaggggaacgaacaccagtctcagagatgccaaccagagcctaatgttgttgagcagctgaaccaaccctgggactgtctttgaaaaatttgatatgcaaacatgcaaaaaaatctttctctttcagttgggaagttttttttttttttttcagccgaaggtatcataacagatacagcattatacacctggagctccaagtgaccatctcattgccactgcaaacacctacccgagagagaagccaatagccaggcgcggtggctcacgcctgtaatcccagcactttgggaggccaaggcgggcagatcacaggaggtcagcagtttgagaccggcctgccaacatggtgaaaccccgtctctactaaaaatacaaaaaattagccaggcgtggtggcgagcggctgtaatcccagctactcaggaggccgaggcaggagaattgcttgaaaccgcgaggttgcagtgagccgagatcacaccactgcactccagcctgggcaacaagagtgaaactccatccaaaaaaaaaaagaggaaagcagaagtgagagtcccttgaacagcctgaagtccctctgtgttcaatgtgttcataggctttccatggacagaggtctttcaattctgtttatggctttgggttgaattttgtgttctgtactcacaatgatcctgactaacaccatttttataaactgaggctcagagagatcattaagttgcccagtcattgaaagaaacacaaatttgtctgcttgcagagccagcatgttccaatccggtttcccagtctcagagaggacaggaggcccagttggagtgagacccacagagtgtgtttattctggcgttgatagcagcagcagtggggggaccggccagacgcaggggtgtggcgaacagaaggggtggacacaggtgtgtgtgtgtctgaaaggacagagaggattggcccattgacattcacggcgagaacaagggtcgggacactgagtcttggacaaacagcaaagagacagagacagacagagggttttggggggcaggggtcccccagacatgcatggcccctcgcctcgagggggagccccagggaagaaaagacagacacagtggaggctgaatgacccccaccctgaaagaaggagctgggccggcctcctctcatcctctcgcttccagggttaggaagcctagggccagggctgccccgcaccagcagctcggacgttatggcttcaaggagatgaattcacggtccgggcaggaaaggatggggtcctgagggagcctggtccgatcccgggcctaggccagacctgcacgatggagcaggaaaggaggggtcagcaatggcagagaactgcaccacgacctcctgtagctccatcaccacccagagatccaggagtcccaggcgcagcccctcctccctcagacccaggagtccaggcccccagcccctcctccctcagacgcaggcatctccacccccagccccttccctgtggccaggctgcttacccctcactcggagttctctttctctgatagtcctttgctgccttttgtgaagctggtcacagtcttttcctaaaggagaaagtgcagaaggttcgggagtgagagacagagagttgaaacagatgctaatcatcaacaggagaagacgtcaatcctgtttcattatttaggatgcgctttctcacttggccctgaagtgacggacagatggtattacaattccattctacagatggggaaatggaggcacaaaaaagaggagtctctgcaaatgcgaggagagatgaggctgtagggatgagtggggcaagtcctgcatggtatcagaggggctgagactctgtcctggggccactggggagccacgggagggctgtgagcaaggaaggggaggggaagctctgggtgtagaaggatcttctggggccacagggagcatgaggggctgaaattcatgggcagtgtcaggactcggcctagactctgtgccaccagcgttgcccaacatgggcagtggctcaccagaaactcctgggaaggttggtgggatgaattaatgaacggatgaatgagtgaatgacaggaggagggagtagcctccatcctatccaccttagtagagtccccgtcttttccaatctcaaatctgagttctgtgcccaggtgtcgggtccctcatgatcactggaaaaaagcccacagcagggccagactaaatctggtgatgtggtgaaagtttcacccagtactaaatgtaaatgtgtgccccaaatgcagcaatcaagataaagaatatttcatgcaatattggccaggcgcggtggctcacgcctataatcccagcactttgggagcccaaggtgggtggatcacttgaggtgggaagttgagaccagcctggacaacatggcaaaaccctgtctctacaaaaaaaaaaaaaaaaaaaaaaaaaaaaaaaaaaaaaaattagcagggtgaggtggcacacgcctgtagtcccagctacttgggaggctgaagcaggagaatcacttgtactcagggagggggaggttgcagtgagccaagactgcaacactgcactccagcctgggtgacagagtgagactctgtctcaataataacaataataataataatgcaagattttaaaaaaaatcaaaattaatgcaaaaaaatcaatgatgaagaaaatatcaaatttttaaaaaaggccagtctcatgccacatcagactgctatttcaaaggaaatgtatgtgccctcatatacttgctttttttttttttttaaggagaggggttcctgctccattgcccaggctggagtgtggtggtgagatcatagctcactgcagtaacaaactcctgggctcaagagatcctcctgcctcagcctcctgagtagcagggactataagcacacactaccatgcctagctaattcctaaattatttttgtagagacaggctctccccatgttgctcaggctagtcttaaactcccaggctcaagtgatccacccaccttggcctcccaaggcctgtgctgggatttcaggcatgagccactgtgccctgcccaagtttttatatattttttctaaatttatttttcctggaatgctaaactagttgaaaaatactgaaaaatgaagtaagtgtgttgaaattcacaacattattttacatttaaatctttcatatataccctagacagaatttgaataatttgactttcttggcttttaatggaggcaaatctgccaataacactttctaaagctacttctttgctcctcttgttttctattgagagaatggccatgtttgattatttctcctgatcaagcgataatcttaaatgacttttttttttttttttgagacagagtcttgctctgtcgcccaggctggagtgcaatggcgccacctcagctcaccgcaacctctgcctcccaggttcaagcgattctcctgcctcagcctcccaagtagctgggattacaggcgtgcgccaccacgcccagctaattttgtatttttagtagagacagggtttctccatgttggtcaggctggtctcaaactcctgacctcaggtgatccaccctcctcggcctcccaaagtgctgggattacaggcgtgagccaccacgcccagccccctctattttcaacttagcctcatgggtaacaacagcagcgaccacctacagaacgtttaactcagcacatctcacctctatcctaacagaagatgctatcaacagtcccatttcctagtgggtaaattgaggcacagagcgcttgggtaactggctctaagccgcacagctaaagttggcacagcagggattgaaacctaggacgcctggctctgcgactcacgaacatgcagggcgttcgttgcatggatgaaggggccgagggtgcacgggtgcttgtcaggggtcggtgtgggacccctactcacctccactagctgatgccagtgctccacgggcttgcggggattggccagcatctctgcccagtgctcgcggccgtgcgggtcggcagcgtcggggcccacacggcacacgccgatcacctcgttgtgcccgatgctgggggttggggtcagtgaggaccgtggagggtggtgggagggcctgtccccaccccagccctcctgcctgacccccgcccgggccgcgcccctcaccagtcgtagtctaccacggcgatgctgagccccacgttctccacgctctcgggggccacgtcgaacaccagcgcctcattataggtggggttcagcgtgttcttcttgatggaggttttccgcttcttcagacgccgcccctcgctgatcagggaggccttcacgtaggggtctgggaacagcaatgaagtaaggaacagagactcactccctcagacctaggggtccaggaccccaggccccgagcccctcctccctcagacccagaggtccggggccccaggcccccagtccctccttcctcaggcccaagagtccagaccccaggtcctcctctctccgacccaggagtccaggcccctggcccctcctccctcagacccaggagtccagatccccagctcctcctccctcagacccaggagtccaggcccctggcccctcctccctcagacccaggagtccaggcccccagccctcctccctcagacccaggaccctcacctgagaagccagtgaggtccatcgctttgaggttagaggctttgatgatggtcacggtgaggcgcccggccgtggggaggtagcagagtgagaagttgagctccccaagatctgctttttcctgcagttggggaaaaggtcagcgatatcttgcctcagcccctcttcaactctccctgattttctctccggtcggagcctcctgctttacaccctgacatccagggctcaggcttcccatccacttagcaatctgactcttgggacaaggcccagtaattccctggccacagctgcccatgaccatcaaagcttatttgttctgcaggaaagattggaagaagcatgagtgaggggagagagagaggaggggagagacagagaaggtgagagagagagaaaacacaaagagaaatagactgagacagaagccaaaacacggagggatacagctggaaagacagacccacaggcaaagttctcaagtcagagggacagaggcccagagacagacacagagagagacccagagagagggagacagagacccagaaagagagggagacagagacccagagagagagggggacagaggcccagagagagagggggggggacagagacccagagaggaggacagagacccagagagagaggaggacagaagcccagagagagaggaggacagaggcccagaaagagagggggacagagacccagagagaggaggacagacccagagagagaaaggggcagagacccagacagagagggggacagagacccagagacagagagatagagacccagagagagacagaagcccagagacagggggtacagagacccagagagagaaagagagagagatatatatagagagagactcagagagagacagaggcccagagagagagagggacagagacagtgggttgggggtgcataaagacccagagagagtgatagttacctagaattagagtggaggggcagagaccagagagcgagagagaaacctagactcagataccctactccctgcaccaagagaaagagagagagagagagagaggctgactcagacagagtgggacaaagaccaagcagacacacacacataaaccagcctgagagagggcaggagattcatcaacctccaccgaagtttccaggactgcccccaaccctgacacacaggctggagccacgctggagctagctgggagctttgaccaacctggcctagccctgcggcctcccaactgtgcccaggactccctactcattcccctcagggcatctgcccaggctgtccctctgccagaacactcttccctctatctctccttggcctttgagcctcccctcgttccacaagctcccagatcccccacagccctgcagaggctcctcctgtgcctccccataaccctggcccctgacacaaggcccgaccatctagacctggagctgccgagggctgcctggggtccccaggccctgctcctgaaaaaaacagtggttgaagaaatgaatgaaggctgggtgcagtggctgatgcctgtaatcccagcactttgggaggctgaggtgggcggttaacctgagctcaggagttcgagaccagcctggccagcatggcgaaaccctgtctctactaaaaatacaaaaattagccgggcatggtggcaggtgcctgtaatcccagctacttgggtgactgaagcatgagaatcacaatcacttgaacccgggaggtggaggttgcagtgagctgagattgcgccactgtactccagcctgggtgacagagagagactctgtctcaaaaaaaaaaaaaaaaaaatgagagagagagaatgtatgaatcaatggaatgagtgaggaaaacctcaagtgatgatgatggagagagaaaatgagaagggtgagcacaagaattaggccagcatggatacagagagaaggccctggcatggggctgccatgggtgatgactgggagtaggagctggtggaatacacaggggccctgggaccttggaactgggcacttcaatctcaaaggctgggcttgggggccaagcaggcaggctggggagggccccatgaagaagcctacccaaagagctacccaaaaagcctacctggcacccagctcaactggacatctgtcattgaacagatggggaaactgaggctcagaaaaggaaagaaccttgaggaggtctagtcctctcctgatatgaaggccgccctccccacaacacacacacagctaccccagattggcagagaactggaatgttggataatccacaaattaggttggagcgggggcgctgtagagttgaggatctgagatttggtggggcagaagagctcaggacacacacacaagaagtacctaagaatggggctggggagggattggaggtacagggagaatgagataccagagggcaggggtcgcaaggaataaggaagaagccattgggccctataatctggatgctgggagaactgaggagtgtctgcatattggggatcccaggatggctgaggcctgggggatcaagctatcagcattcgggcagggaccatgaaaaaacagagggtcagaatatgaaagagttccaatgtcaggggttgggaaaattcagaagttcagagattagagagggattggggctttcagaagttcagagattagagagggactggggcttccagaagtccagtcattggaaagtcaggaagttaggaaggtaagaagtctggggtgagaggggagaagtcatggggttgaggcaggaaggcatcctatggcaaagcgggtgagaggttggaaaatcggatccagacctgatgctaacatttggcgatgttgaggagaggaatggtgtccactgtatcattatctgttcttttttttttttttttgagacggagtttcgctcttgttgcctacgctggagtgcaatggcatgatctctgctcaccacaacctccacttcctggtgcaagcgattctcctgcctcatcctcctaagtagctgggattacaggcatgtgccaccatgcccggctaatttttgtatttttagtagagatggggtttctccatgttggccaggctggtctcgaactcccaacctcaagtgatctgcccacctggcctcccaaagtgctgggattataggcatgagctaccgcgcccggctcattctctattcttgcctgtaagtttgcagtcttccccagtgtgatacattttaacagaaaaatgtggggacaagaagtgaggaagttatgaactctgagggcagggggcttgcaacccggggggtctcagggccctgggaaggggaaggtcaggggagagggccactgaccgagccgccctccacgatgtccctccagagcgggcggtcagggggctgctcggccagctccaggaggttgtccagcaccacctggccgatgaggtcgtgccgcgagaagcggtcaaagtcatagacgctgaagtgcagtttgcgttgggccagctcggccaggggcaccgagaattgaaacgtctcattgaagacggggttcagggtcttcctgtgcacctggtggtggtgggcgacaggagacagacaccgtgcccataagcccctcctccacaggatccaggagtccagcccccagcccctcctccctcagacccaggagtccaggcccccagcccctcctccctcagacccgggagtccaggcccccagcccctcctccctcagacccgggagtccaggcccccagcccctcctccctcagacccgggagtccagagccctagctccctctctgtgggaacccggtgtccagcccgctgctccggaccttggtctgaaactttttcttgcggtcaggcagcaggtagatcttgacgtaggggtctgagaagccgttggagtccttggcagggaggtccagggcctgcaggatcctcaccaccagctggtccgagccatagaggtaccgcagggcgaagctgatacggccacagggtgcccctgtgcctgcctctccagagcctgggcccccaccgctccgccggccaccagggccagtcccctggtacagctctggcttaatctgcccaatgagtttggctttttcctcgcctccaggcaggggtaagggcagggcaggtggccgctcctcactgctggggtccggctgggaggtcagagtctgctgggtgaggggtcggggcagggctgggtacctgtagggggttggggggagaccaaggtgaggtcagtggctctgatcttcgactgcatgcagagacctgggagactcctccctgcctttccccccatcccccagccaggtggccacaagtcccctcctttgctcactgtgtgagcttgaggaagccactgtgctctctgagcctcagattccccattggtatctggggggcattccttctctccctccctccctccctccctcccttctttccttccttccttctttccttttcttttgagacgaagttttgctcttgtcacccaggctggagtgcaaaggcgcgatctcggcccactgcaaactctgcctcccaggttcaagtgattatcctgcctcagcctcccgagtaactgggattacaggcatgcaccaccatatccggctaatttttatatttttagcagagatggggtttcaccatgttggtcaggctggtcttaaactcctgacctcagatgatctgcccgcctcggcctcccaaagtgctgggattacaggtgtgagccaccacacccagcctcattctccccatttcaaagctagctccagcccagacctgtgcataaaccagcttccagtaacctcttttggacctcaagctggtgacccaggatgcttctccatggacccctggcagaccttctttgaacgctcttctgcccttctcttaatctccccggctgtctctcctctctatccccactgtcctggtcacagctcaggccttgtcctctcctggactctcagcctccagtgtctccctccagcccactcccatatggccccagagggttccttctacacccagagctgagcctgcccctcccctgctcacagccctcccatggctcctcagtgccctcaggacaaagtcccagaccctcaggcgggcactcaaagccccatgtggtctggtgtctgtagtcacatctctgaagttttctttttcttttttctttctttcttttttttttttttttttgagatggagtctcactctgctgcccaggctggagtacagtggtgcaatcttggctcccaggttcaagagattctcccgtctcagcctcccgagtagctgggattacagacacacacaaccatgcccggctatttttgtttgtttgtttttgtatttttagtagagatggggtttcaccatattggccaggctggtctcgaactcctgacctcaagtgatctgcccacttcggcctcccaaagtgctgggattacaggcatgagccactgcgcccagcctgaagttttccgtttttcaaacttattctcatgccttggtgactaaggcttggtgccctggctgtccccttggtgtgggctgtcctcacaatgcactaggatctcgttctcctcttgtctttgcctgggcctctcctttcacctggaatgcccaggtcacagccctgcctctttgccttcccaactctccctcagcctgcaggtctcagctgagacatctccacctccaggaagctcccagccttctcccagttgcggttccctgagtcgctttcctgtctcaccaacctggctacaccaggacagccagtctgggggtcgcctcccctgcgctgtgagtgacaggagggcagagtctggtgttttcctaacacccctctcaggcctagtttatatcagtgctcaatatacatttacatgtatattgagaaataatgaatgaaggaactccaggtcccactaccaatcctggcttagggtgaaagggggtgaactgccttgtgccacaggggacttggggatccaaccttattctcctctactttcctgtcctaagtcctgcccccagtctcctccctctggacccaggaattcaggcccccagtcccctacttcttctggtccaaggggtctagaccccacagccccaacctccctcagatccaggagtctagggccccagcctcctctttccctaagatccaggagtcaataccccgattcccctccaaatcccgaactcataagagctatagataggaaagagacacagaggaggagcagaagttcagagtggacccccaacccagtatcctctctcacctggtagtgggtgccaggcttgtgacctgctgatgtgactgggcactgggcaagcccccaccactggggggcagcaggagcaacccagagcctgctcccccctcagagggcagctcaggggatgtttggctcggtttgaccccagcggccactgctgctgctgcagcctctggatacgagtccatgtccaagtaggagggctcaggggtgtcagaaccccccaggctgcctggctccagcagctcagcaaagggtggatggtgggcggcatgggcatggtggtgtgggccgcccagcagaggatggccacccaggccagccgccaggtggtgcccgcctccgcctaccaggcctgccagcccgacaccagggcctaggtctttgcgcagggggccaccgcccactgccgagcctcccttgtcccgccagggcacccagcacaacttccaggacacgaagagagagacacccagaaggacaatgccacagaatgtcacgatgaccgacagcaggctcacggagatgtctggagagaacgaggacagaggtaggggtcaggatggggtcacagtacatcctccctctgctgtccccaaagagttaacccttcatatttgccatgcaattgtccatgcaattgcaagtgccaggcactttacatgtattacttaatttatgttctacaactctacaaggttaagtattgtatttttttaaagagatggaatctctgttactcaggctggagtgcagtggcataatcacagctcactgcaccctcgaactcttgggctcaagcaatcctcttacctcagcctcccaagaagctggaactacaggtatgtgctatcacacctggctaacttttaaatttttctgtagagatgaggtcttgctatgttgcccaggctggctcgaactcctggcctcaagcaatcttcccaccttggcctcccaaagtgctgtgattacagatgtggccactgtgcccagcccagtagttctatatgaccattttaaagatgaggaaactgagacacagagagattcagtgatttgtttaaggttttacaagtaataaatgacagttctgagatttgaatccagcagtctctctccagattttattctcttaatcactagactttgctgcctctctataatagaacacaacatgtgaggtagcaccaaggtcctccaaaatgctcagagatggtcaaggaagcatggaccctgcacgacacagttaggcagggcagggtttaaatcacgcttgctgtgtggccttgggaacatatcttgaccactctgaaccttacatttcccattttccaagtaggaaaaatcagttcttccctcttacagtagtttgaaggaatgcagaaggtaaatcacatgtggaagataataacaaacatatcttgaggggtgattacataccaaatagctcagtactttatagagatcaggttatttaagcctgccaggcactacatgaggttggcaacatatttatccctgttttccacaaaagaaaactgaggtctgtatacccatagttacctgctcaaagtccatagctggtaggtggtagagtcaggatttaagtctgggaagcctggcttcagagcccatggtctttactatgatgctatcacacctcaacgcttcccaataaatggtagttcaaatgtgaatttttattagaataataaatcctattgctgccactatgtgcgtccaacaccatcaacaagatagctaacacattctgaatgccacatatgtgctgatatgccttgcagagaaacccaagtacagaattgttcttacaatcaaaggttttaggcttcttcagtaattggtaccaggagtggggtttttcagaaatgaccttcaaggaatgggaatttgttttgaaatggacttctgggtgttgacaaagtgaaagacagggaaaatccctactcctgacagacagtgggttatggtggggaagcaggtagctaggccattgccggcaaggacagctgagtggaatggctgtgtccagttatattaggggacacacagcaggaaggggttgccttctggtcctgtactgcttagtgaagctacagtggtgtgtgacattaatccttatgacattatataactttggaatgacttatcccattttacagatgagaaaacaggctctgagagagaggaagtggccctgcagggacatataccaggcactggcagaagaactctgggtttccttcccccctccctcttggggtgctttttttttttttttttttttttttttttgaggcagagtcttgctctatcatccaggctggagtgcagtggcatgatctcggttcactgaagcctccacctcccaggttcaagcacttcctgtgcctgagcctcctgagtagctggaacaacaagtgggcaccagcatgcctggctaatttttgtatttttggaatagacggagttttgttatgttggccaggctggtcttgaactcctggcctcagatccatccacctcggcttcccaaagtactgggattacaggcatgcaccaccatgcctggccagagtgctccttctctttttttttgagacagagtctcgctgtgtcacccaggctggagtgcagtgatgtgatctctgcggagtgcagtggtgtgatcttggctcactgcaagctccacctcctgggttgatgccgttctcctgcctcagcctcccaagtagctgggactacaggcgcctgccaccatgcccagctaattttttgtttttgtatttttagtagagatagggttttaccatggatggtcttgatctcctgaccttgtgatccgcccacctcagcctcccaaagtgctgggattacaggtgtgagccaccacacctggcccagagtgctcctttttaagtgaccaacactcactgagcattctgggtggcctgttagaaaccagaggcaaggactttatgagcctcctgaacacaggttgagttgagaaaacagggtcattgtggagaaaaattaaacagatgctttcccctaccgccagcctgattcagaccctgtccaactcaaaacatgaatcccacaaaccctgacagattccccattcctgtctgcacagactggggagttatttgggcgtggagaggtggtgtagttgcgcagtagaagattcaccttgcccagagaaaggtttggcccttgatcagctcccgggagggaacctctaagcccatggaatgtcctgcctgattagagtgtctttgtttacctggggccttggatcatgtggcatagtctatgttaacactgtgatatatgctggaggcctccagctcagcctctggaggagctggagactaaagtcagccacaccagcaatcagtcacgtatatgaggccgacccccaataaaaaccctgcccaccaaggctcaggtgagctttcctggttcgtaatagactgtgcatgctgtcacatgtcgttgctgggaaaattaagcactgtccatgtgactccactgggagaggatgactggaagctcacacctggtctgtcctggactctgccctgggtgcctcttccctttgctgacttcagtctgtatcctttcactgtcataaaccataaccatgagtataacagtttccagccaggcgtggtggctcatgcctgtaatcccagcactttgggaggctggggcgggtggatcacttgaggtcaggagttcgagaccagcctggcgaacaggatgaaaccctgtctctactgaaaatacaaaaaattaactgggcgtggtggcagacgcctgtaatcctagctactctggaggctgaggcaggagaatcacttgaacctgggaggtggaggatgcagtgagccgagatcccaccattaattacactccagcctgggcaacaagagtgaaactccatctcaaaaacaaacagacagacaaacaaaaacagtttcctgagttctgtgagtcaatgattctagcaaatcattgaacctgagggtggtcatgggcacctccagactacagtgctgtactagactatgcaggattcagttctgcctctgctaccattgagcctctgggcaagtgactgctgctctctcggccttatccctcatgactgtcacctggacatcctgcacatgaggtgccagaccctgccctggtgctcagcaagtgtgactgtggttgtaatcactcagcacatgcttcctctggtcaccgtttcctcatctggacaatggcactcataatgtttcctcattcccagaaccctgctgctttctagctgtgtgaccttggacaggtcacttcacccttctcagcctcagtttcctctgttgaaaatggggattatatgttccacaaagggtcactgtgagtaatcattgagatgtgcagaggacctcgcatgctgcctggaccacagttggtgctcagtaagtgaatcccagcattgttctaagttcttcgtaggtgttatatcatttaagtctttcatctgctctatgaagcatcccttttattatccccattttccagatgaggagactgagtcccagaagaagagtcacttacctacagccatgcagttattaataaagtgagggagatgggacttgaacccaaacaagtcagtctgactcaagagcctgacatttgcacaagatgcagagagatatctgaagggggcatttggtggtggtagtcggagggaggcccacagggcaaaactcaaaaagcagaccacacagctccttccccttggatcagagatttgggagaagggcagcagcaggcagaatgggggcaagacgctacgagggactgaccccacaagcaatggaaagctgagcagttctgctccgagtctcctggccatagtgcaagcagggggctggccaagacaggcaggggtgctgacctgcatctggaccccggggatagcctcggattcggtcattgaactcctggcacctgtcgttggtgtcagcatctcggacccgcgcacagaggtccgagaccaggatgagtgcccgccggcagaggtcatcctcgtagtctcctgacatggtggccgtctggtcctgtgtgtgggagggatggggcaagggtgcagatgggaaacagaatgggagtgcagggtgggcaggtgtggagataagggtggaaagagacaccgagaaaaggaaggatgggcaaaggggacagagattaggggcagatggattagggatggagattcgaggaagaaggacaaggtgacaggtattagggatggacaaggaaaaggaattaggagtagacagacaagagggcagaaattagggatggagatagtagcagggactgggtaagtcaaggggacagagatgggcatgagtggagtagaggacagagaacagggacaaatgaacaaggaggaagagatggagaagggcagtgaaggggctaagaatgaggatgcacaaataaagggatggacagatgaggaaacaaagattagggctgcacagatgaaggaacaggagttagggatgagcagacaaggtgccagccattcatcattcattcattcaacaaacatccatccagcaccaactacgccctacgtgctgtgctggttgctgcgaatccagcagagaacaaggtcctggagttccctgacctcccggtgtcacaatccaacgagaggagacatagagtaaacaagcaaacaaaaacacatacacaaaccggtcactgtcagactgtctgtgagaagcgctccacaggacacagctggagaatgtgtcacaaaggaactcagaggggggcggtcagggagggctctcccaaacctgaaggatgacatggagccagccacaggcggggggcagtggcgccaggatgggaaaagcattttaaagaaaagcattttagacagtaggagcaggatgacaggggcttagggtaggaaagcagttggagggtccagggaccaaggaggccagactggggtagacgcggggagggccaggagagaaggatggatgtgggtagagagattggaggtggataggtatggtgggagctgggggtggagaggtggagatgcagagatggggaccaagttgagggagggagagatacagggaggggagacagagataatgtgaagggcagactgaggctccgaagagatggagaggtgaacaggcaggcagaaggaaagtcaaggattgagacttgggatggacagtgacaaggaatgaaccgagatgtaattaattcacgggggcttgagagacgagaggacgagagacggtgaagaggggcaggcaggagtgtgggcagaaatatctttgaaagagaaacggtcgaacgggaggatggatgggtgggcaaggacagcagatgatggctagagatcgcagatagacaaaaggagacaggagggctgggcagacagacatgggttcataagggaaggttcaatgagcacataaatgagaggaggctaggaaggagaggtggatgtggggagagggggaattagtgacacatggctcggagccaggcatcaagatgggttgaaggggatgcaggggaattaggaacagacagaccagggctcacagatggacaggtgtcgtgggggtgctgcagaaggccaggactccaagacaggcatggccacactcacctgcgcttatctctgccgtgtcctgggtggcagccgaggcggcggcgggcggcagcccatgggggttctagggcggacaaggggctgtggacccgttcccacgcgccgggtaatgagagagaatgtctgatctaggggctgaggccgggagaaaaagctcagcttaacagtcacatcttgccctactcgagccagctgcccgaccccaggcgacccactgggagcccggccaccccctcccacctccgggcccccagctcccgttgagggcttagagactacaattcccggcaggtctcgcgctcgcgctgctgcggcttcatagacccggcgctgcaggatctgctgggagttgaagtccttaatgcctccgggctgcagagaggatgggattttttttttttttttaaggttttggggggttaagatgctggggtcccaagacgcttcaggggaggggaacgatgtccgggacttcgaaaagccacggagccctaagtccttaggggccacggaatgaggaaacgatccccccgcgctggggatcggtgggcgaggggtgggatacacccaggtgtttcgggacccccttccagggccacgtgcccctcccccggggtggccagagagcgctgcagcgctcccactccccggcccgagatccacgcgcctctgcatctaccccgcccccatgcgccggggccgaccccagggatttgactggggctggggctgtggcaggaggagggggaggagcggactcacccggagccgccgctgccgccgctgccgccgccgccgccgccgcagccccgcgcgccagccgcggtgccggctcggctcctcccctcgccactgtcgcaggtccgcggctcctccccctgcaccccctccttcccccactccgaacccgcggcaagaaagccgaaatcacttggcctcagcaaggaagcagggagattgcccgggactaaggcagcagagacccagtgggtttccacactggggacccagagatctaggatcacgacgtgctgcttctccagggtccgggggcccagttctccgccccgctatctcacagaggtagaagtccggggaccccaggcccctcttcccaggaacccaggacttcaggccctccaacctgagccgctctgaaggccggtggtaggagcggaagctgagactcaaaggtacagtgccacagccaggatagaggtactagcagggacctgggtttgaatcccacctgggccaactcctgcctgtgtgcgcctcttgctctgaggccccgtttcctcatcagcaaaatacacaccataaacttatttcctaagggatccacagtttgaaaaaccggtcagtgtagacaaaacattggtaccaactaggtacttaatgaatatttctcaaaagtagtgagtaacagtttctggtatattaatagcagttaatggcaattgtcatttcctataagtggtgaagtgctaagtgctttgaaagcgttttctcatttaattttcacttgggtgcaattatgacattcccatttcacagaggagacaactgaggcccatggaggttaaatcccttgggtaaggtctagatcaggggtgtccaatcttttggcttccctggactgcattgttgtcttgggctacacataaaatacactaacagtaacaatagctgatgagaaaaaaaaaatcacaaaaaaatctcataatgttttaagaaagtttacaaatttgtgttgtgccgcattcaaagctgtcctgtgctgcatgcgggcctcaggccatgggttggacaagcttgatctagatctacatagcctggagaggtggctcggaggccccctcagtgctctcaatcagtgacatccaaataaatacaacctctaggtaaaaatcaaaggctgggctgacacctgtaaatcccaacactttgggaggctgaagtgggaggatcccttgaagccaggagtttgagactatcctggacaacgtaggagactccatctctacaaaacaaaaaaaccaaaaaaccaaaacaaaaccaaactagtgggtgtggtggcgtgcacctgtagtcccacctacgcaggaggctgaggtgggaggattgctggagcccaggaatttttttttttttttttttttttttttgtgagacagagtcttgctctgtcgcccaggctggagtgtagtggcgcgatctgggctcactgaaagctccgcctcccgggttcactccattctcctgcctcagcctcctgagtagctgggactacaggcgcctgccaccgtgcccggctaattttttttgtatttttagtaaagacggggtttcaccgtggtctcgatctcctgaccttgtgatccacccgcctcggcctcccaaagtgctgggattacagacgtgagccaccgcgcccggcctagcccaggattttgaggctgcagtgagctatgattgcaccactgcattccatccagcctgggcaacaaagcaagacccccatctcaagaataaatagccaggtgcggtggctcatgcctgtaatcctagcactttgggaggccaagtgggcggatcacttgagctcaggagttcaagaccagcctgggcaacatggcaaaaccctgtctctacaaaaaatacaaaaattagctgggtgtggtgatgcatgcctgtagtcctagctacttggggggctgaggcagaaggatcacttgaacccagaaggtggaggttgcagtcagtgagccaagattgtgccactgggctccagcctgggcgacagagtgagaccctgtctcaaaaataaacataaatatgaataaataaataaatatttagagcaagaaataaaaatgtcaaaataagtaagtaaataaaagtaaaaattgcttgctgcttctgcaaatacaactttaagcacgcatcctgggccctccctctaattagattacaccctacccctattgctgcctatgtgtacattttgcagccattatactaccacagaacccccagaaatgcctcccaggtttgccgagtctcttccttgtggcttcttgcatccccccagatggatgtgtgtttacatccagggaagcatgtgcgggtgtaaacctacagaccacgagtgcaggtccccatgccaactctaacagcccgacccttgaaccctgctgggcctgcccagggtccacaggtagccctgttccacagggagagacacgcagtgatgcacacactcagagatgggcacacagatgggcttgccacgctgccatgacacgtttccaaagagacgctcggattccgaggctgcccaggcattgagaggcagccgtagtgcactggttttctgtgtgactttgggggcagagcactgggattcaaatcccagctctgctcccctctctatgcaaccttggaggggttacttagattctccatgcctcagtttccctctctgtaagtgcagataataatactttaaaaaatcatactctggctgggtgcagtggcacatgcctgtaatcccagcactttgggaggccgaggctggcagatcacctgaggtcgggagtttgagaccagcctgaccaacatggagaaaccccgtctctactaaaaatacaaaaattagccgggcgtggtggcacatgcctgtaatctcagctacttgggaggctgaagcaggagaatcacttgaacccaggaggcagaggctgcagtgagccaagatcatgccattgcactccagcctgggcaacaagagtgaaactctgtctcaaaaaaaagaaagaaagaaaaaatcatattgtatctcactgggttattttgagggttaaattaaattcatggaaggtgcttaggaaaaatggctagtgtttagtgttgtcataaataaaaattaaatgcatttgctcatttaaactttagctggacttgacaagtgaggaaattgaggctcaccaagggaagcgctctgcccaagatcacacatctggaaagtgtgagtggagattaaaaactgtatgggtctggaccaagtgcagtggctcacacctgtaatcccagcactttgggaggccaaaggtgagaggatcctttgagctcaggagttgagacttgcctggacaacatagtgagacctcatttctacaaaaaatacaaaatttagccgggcatggtggcacacacctgtagtcccacctgcttggggggaggctgaggtgggaggattgcttgagccccagaagtcgaggctgtggggaaatggaggctgcccagagtcccgtccttgtgccttcttgcatccccccggatggatgtgcgtttacatccaggctggagtgcagtgagccatgatcgtgccactgcactccagcctggatgtcagagtgagaccttgtctcaaaacacaaaaagaaaaaacaaaaaacggagtggatctgaatccagagcccttgcctttagccaccatgctgtttgcatctaggacccatttgaggacttgcatgctactgctgctaggagtatagaacaatataaagaacaccggacagggagccaggagacagagatagaatcttccatattcattcaactcgattcatgcagtcatttgagaaatactttctgagcacctaatgtgtgccaggcatttttttttttagacagcagggattcatctgggaacaaaatagactaaaattccagggttggaagagctcatggtctagtggaagagacagaaaataatcaaataactacacatactaggatcctcatactaggatcaatgctaggaaggaacatccattgtgctgtgtgtttgagagaggtcagagaagttcctgagcaagtgacttttcagctgagctcagaaggatgagtaggcataagccaggtggtgaagatgagggaggggaggggaaatgctccagggagaaggaacagctcatgtaagacctgggggcaggagggagtttggcaccttgagggctgtcaagcacacaagccccgtaggagtagcactttgttttgttcatagctgtgtcccagctgcctggcacagtacctggcgcatggtaggcactcaatacttattggttggttgaatgaatgaatgaacatgtgaatggataagtggaggaatgtgtgaatctatgatgtattgatggatgggtgcatgactggatagatgctggaaggatagatgaagggatggacagataggtggatgagtgaatggctggatggataagatggatgttggaggaatagatgaaggaatggatagatgaaagagtggatggttgggtgcatacatggatgattggatggatagatgaagagttagagtggggatggatagatggatactgcagaaatagatgaagggatggatgagtgaatggctggatggatagaggatagattggtggatagatggatggatgttggaggaatagatgaagggatggatgagtggatgagtggatgagtggatagttggatgggatggatggaagctgcagaaatagacgaagggatgaatgagtcagtggttgaatggatagaagatggatggatttgtggatgggtggatggatgttggagaaaaagatgaaggaatggatggatgagtggatgataggatggatggatgctgcagaaataaataaagggatggatgagtggagggttgggtggatggatggatgattggatgggtagatggagaattagataaaggatggatggattttggagaaatagatgaagggagggatgagtggatggctaggtgcagggatggatgattggatgattggatagatagatgaagagttagatagaggatggttgggtggatgttggagaaatagatgaagggatggatggatgggtgactgattgaatgagttttcacaaatacctacagattcacacacatatgtgcctggaggtagatgcagatacactcagaggcatgcacacatgtgtgtaaatacagattcacttgttctcctggtgctcctcctggagagagcaaacactgagaatggggaggtggggagacacaccttttggccagggctatggccatccctgccaccactgcggcgctgacagtatttctggaattggaggaaaacgctgattcaggggtgtgtgttttagactgggcaccaggccaggaagtgggacagggatggcccagagagatggattgagtggcagagggaagtcggtcggagtaaggcagagagacaggcaaggcgacagagaggtggagacacacagaagcagagagatggggaaataggcaaagtcatggaggcagagacagagacatagagagaaagggaaggaaagagagatggagacacagaaacagagatggggaaatagagtgatggagacagagacagatgtacagagagaaagacagggagagaaagatggagatacagagacatacagaaatctacagagatgcagacagtgagagacagagatacaggaatacagaaacctgtgatacaggaattcaaattcagacacacactgtagtcccagcactttgggaggctgaggcaggcagatagcttgagctcaagagttcaagaccaacctggacaacatggtgaaatttcagctttaccaaaaaaatacaaaaattagccaggcgtggtgtgtgcgcctgtagttccacctacttggaaggctgaggcgggaagatcgcttgagcctagaaggttgacgctgcagtgagctatgattgtatcactgcattccagcctgggcccttgtctcaaaaaaaccccccacgaaacccaaacccccacaaaaatcaaatgcagacacacagagagagatgaggtagggttccagagacaggtagagagaagggaagaaagataaagacacagagagcaaatggaggcacagatagatggagacatagagtcccaaatcccagagggaagaagagagacacagaggagcagagagagatgcagaggaggagggacagtgacatccagccaaagctagatgcagagtcagaggactggaaaggaaattacctccttttgggtgcctccttggtgcctggctccgatttgggggtgctgctgtaccttgcttcacttaagcaccaacagcccttgaaggtagcattgaggaaggcaagagataaggaagacgaggctcagagaggggaagacatttgcctgacattgcacagcctgggagcagcatttgatgctggtctgtttgatgccagagcccatgttctcttcttcaacttatgttggctcgtgaagaccaggagggacagggcagatggggttagggggctactgagtgtgggtcacagaaatagagggaaataatcatgtattcattcaactcatgtgtcctgaacttcccagaagcctggcccttgtggcgtgatgccagagagccagagatgagtcaggaaacaaatttctgagcaagacagatggggcggagggcagtgttcagaggtctggagaaggagcagataaaaaaacagtcggagggaggagacagaaaacacaactggtaggaggatgagtcagagagggcttcctggaggagagggcacttgagcttcttattaaaagatgagggcatttggggacatggggaaaggttggaagagcattccaggcagaagacacagcatatggaaagagtggagacagaaataaggtgggatgtgtgggagggattatttatttatttatttatttatttattattttgtttgagacagagtcttgctttgtcgcccaggctggagtgcagtggcgcgatctcggctcactgcaagctctgcttcccgggctcacgccattctcctgcctcagcctcccaagtagctgggactacaggtgcccgccaccacacccggctaattttttgtattttcagtagagacggggtttcaccgtgttagccaggatggtcttgatctcctgacctcgtgatccgcccgtctcggcctcccaaactgctgggattacaggtgtgagccaccgcgcctggctgcgggagggattatttatataaaataattaataaagggtaggtggagaatgtttggaggggtgaggttgggagagggaggtgaggttagatcatgcagctctttcagtccaggtgaggggctgaaagtttgtctaaggcactggggagccctgggagggccgtgagcagggcaggggcaggtcagttccgggcacagaaagaccactctggagcctcacttgtggggagaggaatgagggcgagagaatggaggatggggcggccaggaggctgggccaggtgtggtggctcacacctgtaatcccagcactttgggaggctgaggtgggaggattgcttgagccccagagtttgagaccagcttgggcaacacggtgagactccatcttaaaaaaaataaatagctgggcgtagtggtgtgggcctgtggtccccattactcgggagactgaggtgggaggattgcttgagcctgggaggtcaaggctgttataccgctgcactccagcctgggggacacagtgagaccctgtctcaaaaacaaacaaacaaaaaaggaggctggggcaagggtcccagcaggagaggacgaggtctgagtggctgctagagctatgggagtagagaggagaggaaggagaggcagaaggaatagaacttggagacagataggctgtgagggtcaggtgtgcctgtggtcaaggcaatcatgtcctccatcccgctgagataaaattgccagctggaaatggaagacagcttgatgggagagaagcagatgtgaagatgccaggagggggtcagggcccccagaactgagtaagactatttcaatctggactgttttaattgctaataacggaaacgcaaatcaaattgacctaagcataaaaggaagtttattgattggatgagggcttcaggcattgctggatccaggtgttccaatcatctccaggaatccaactgtctgtatctttgggctatgcttccctcgtgttgtctttgctctcaggcaagttatctccctgcatggtgatgtggtagcaccgagagctccaaccctggctctgaccagccccaaaaccacaggggaaaaaccctgttttctaacaggtccagcaaaagtccaaaggttgactttgtagcctagattgattcttaagctcgccactgaacaaatcactgaggaaatcaaggtgccaccacctagaacgaatacttagtaagcaggaacaacagacagtccagagaccatctggatgtggagaaagaggaagagaaagagatacaagtaacagagacaaagactgcaaggacagacaaaacaaataagcgaaggtccagcttcctctcccacaattcctgcagagagctctgcagacccagagaaagggatgctgaacaggcacctacacggctagaccccttctctctagcacgagaggccccgtgagaccccagacccagaagtccaggcccccatcctctcctccctcagacccaggagtccagaccccaggccctcctccctcagacccaggaatccaggcccccacccctccccctccctctggaggcaccatggcaaccaggccccctgcccaccatcccctccccactagagaacccactttcgttggaatctcgcctgtttctaaccagttcctggctggggcagggatgagcagagggcaagtgggaacagaaaggggatgacagaggggagggggcctcaagggggcagtggaggcagctaggagaggatagagatggggcaaggagactggtgagaggtgggaagacagagagagggtgacggggttagggagaggcagaaaacgatgaagacaaggagggacgggggcctggggagatgctggggaaactgatggagactgaagagatggagcccaggagagaaggagggaggaggagggcagagaaatcaagcaaaagagtggtggagacgtggggacagaggggaggaggcaggggggcagagagatggggagagaatgaggaagggaggtggagagagaggggtggggaaagggactctaggagacagagagagataggaggaaaaacagggaaatgggaaagaagggattggggcacacagggagtccctgaggtcaggggaacccagatctccacatggtctcagccttccagttcctctgtaattctaccccggggcttcaaagaggaggtagaggaggcagcggtggggagaaggagctggggtgggtggcccaggcagagcctctcttgccaccttcctgagacatccctcacccaccttcccaggatgcagccagaggtggagcccgtgtgcttccctgccatgggcagccccaccatgcacaggaaggcaggtactgagctgtgtctttgggggaaggggtggacttcctccatccaggcagtgcgtagtagcccgggctcacagtgtggccttaagcgagtcactggcactccaaagtgaaagccatccctagcattcctggattcaccagattcctggagagcggcccccttggacctcaaactacatttcccatgagcctctgcagttccttggccaatgccctggactcagaactacatttcccatgagcctctggggcctaagcaacacctctgaggccattcttctcctaggtaacctcactgtcttgtctcccaccctgagctcagcatcttcccccaaagctgctctcctccttcctggtttccattttcaaatggccccaccgccaacccagtcactggtgccatccttccacctcccacaattccctcccacagcccatcaggccctatcttcctgccctctgactctcccttccccattccttcctctctgtccccgcagccctgtcccaggtctcatcctcttccatgtggaccctctcctcacctcctccctggtccccagtttctctcctcctacctatccctccatggctccagagaggtctctctgacttcctgcagtgatcctggctgtcccttgctcataacacttcctagcttcctgtcacctctaggacagagacccaaagctccagcctggcttttgaggccctgtgtggtctgacccctgctgacaacttcaggctcctagcccagcacttcctgctagcactctgtgctgtagcacagctcatgcagttacactcattcaacatttatggagtagtatctcagtgaggatgcatgtaactgcaggtaatagaaaaccaaactcaggactgggtgtggtggctcacgcctataatcccagcactttggaggccgaggtgagtggatcacctgaggtcaggagttcaaggccagccagcctggccaacatggtgaaaccccatctctaaaaatacaaaaattagccaggtgtggtgccgggtgcctgtaatcccagttactagggaggctgaggcaggagaatcgcttgaacccaggaggcagaggctgcagcgagccaagattgtgccactgcactccagcctgggtgatggagggagactctgtctcaaaaaacaaaacaaacaaacaaacaaacaaaaacacccaaaaccaaaactcactgcagccttgagctcctggctcaagtgatcctcccacctcagccttcgaggccgaacaaatgccctgatggcaaaacaggcgttgtttctctgcctttaggtctcttttagtgcttttgaaggcatctttcttttggagaccccacaatgcaccatctctagcctagactgaggcacccacgtgacatgtaatttatatgtagctccagaaaagtcaagtggagttgagtcgaccagttggctagttttgttgatcgacgtttgttcatttcgattttgctgttttctttgcagcgttgtggaaccaatcacattttttagttgatcaggttgcaaacttcagcataggccattagaaagcccctgggtcccaagcattttgcctgtagtgcctaatggatgaaacggcctggcttgttctcatgctgggagaggagacgtgaaacacgccatctcacagatcattcatagcctccaatggcaataagcgctctttagtcttggggctcaagggaattctgggaagttcttgcaggtgactctcttctcttttgctcaaaaaccttggcccatgctaggcccttcatgggaaacatccttctctctgtcacctctttatttggtaaataccttcttattctttaggtctcactgtggacacctcctctagagagccttccctgattgcccctagaccgggagactgggctttccctccaccttgtaacactttcattgaaacacacattgccctttatctgagagttctgaaagggcagaggtgtgtctcattcatctcttggtccccagcatcctccaaggcacacaggggccctctgagatgcctgttaaaaaaatttaaccagctacttgggaggctgagacaggaagatcccttaagcccaggagttcctggctgcagtgagctatgactgcaccatgaccctccaacctgggcaacacagtgagactctgtcaccaaaggaaaaaaaaaaaagcttgaaatggttgcatttcctcaatttttcaataagtacttatttttaagtttatgcttatgttaatttaattacacatatacatttaaatgtattaaatacatttacatatattaaaatcactgttgtaactagaaatagttcttatttctaatgtcatatttcatgagaaactattgtattcacattttttcacatgcatctttgatgctgctagagttactttttgattcatttaacgcttgtacaaggctattttttaaaattaatttattgtgttgagacagggactcactttgtaacctaggctggcatgaattgacaccattgtagctcactgcagcctcaaaatcctgggctcaagcgatcctcctgcctcagcctcccaaagtgccgggatgataggtgtgaaccaccatgcccggcctataattatttttgaatatcatctcatacctagtacatatttaaatttccctaattatctcaaaattgtatttttttatagttggcttgtttaaattagggcccaaacaaagtgcacacatttcaggctttattcaataaatactaaggacaactataagcctggcactttgctagatgctggggacgaaaacacaagtccctgcccttacgttgctcagaagacgtagggaagacagagtgtaattagggaatcatagaaataaaggtaaaattgcaatactatgagtacaaacatactgtgctatgaggaatggcatcagtggaccctcagggagacttgattagccaaatgagggggaagagagatccacgcagagttacagcattggccaagatcctgcagcaggaggggtcagagagtccaagtcgcagaaaaacagcgtttttggactgcagcaggtgaaaaggacgattgtgcttgatcaggtttaagacactagcacggtctgatcacgtgtggtcttatggtcactggaaggactttggactttattcatcccacagacaatgaaaagtcctgggagggttttgaggaaggggccatagggtcaggtctacatgtcaaaatcctgccttgctggggtaactggagagcgagaggagttaggagaccaggtgagagtgaggtgagaggaaggcacctggggagattgagaacacgcacactggatccagatgcttacatttttatccttattctatcattttgtgctgtgtgactttgggcaagtcacttaacctctctgtgcttctgtttcatcatgtgttaaacaacactacctcggaaggttgttgtgaggatgcaatggaaagtattttattctattctattttattttattttggcactagagtcttgctttgtcgcccaggatgcagtgcagtggcacgatcccggctcactgcaatctctgcctccagggttcaagcaattctcctgcctcagcctccggagtacctaagactacaggtgcgcgctaccatgcccgcctaattttttgtatttttagtagagatgggatctcaccatgttggccaggctggtctcgaactcctgagctcagtcaatctgcccactttggcatcccaaagtgctgggattacaggcgtgagctactgtgcccggccacagtggaaagtattttttaaagtgtttggcatataaaagggacagtaagcacatagttatattgttaagtggacagacttgaggaggggatggctgtgtttgagggatggagggaggccggtatgactggaagaaaataatgagggtaggtatttctggaaggggatcccgtgaaaatgtagatttgaatccagtaggtctgggggtgggccctggagtaagtgtctaccgcacgtgtgtgtgtgagagtgtgcaggagagcccgttgtgaaacatataccagcacaccactgactatagttaaaccaagttgaatgtgttgacttattgtaatgagagacagcacacacacacacacacacacacacacacacacacacacacacacacacacacacacacgttgtctcagtagaagggtgttagcaaggacttattgttagagccgggctgtgtcaggtgactttggggagggttcacgggggtggggctttgctctggatgggagactgatggaaagcacaggcaagcccatgactgggaatcttcatctcattgggaaccaggaggggtagatggagctaatgctggggttaatgaaaaagcagccgtcggctctgagctgggagggggggattttggtcatttttgtggtttggacaatgttcatgtttgttgtgttgagacatgattcaggggtggtcttgtttttgtctcagtccatcacggtcacagagtggccttgcttgatgttggtgttacgggaaatgttttatgttcggcaggagagcaccagggccgggctgtcagtgtctgcttccctccctttcagcagctataacaaagacaccccaaaacacaacatcataaagaagacagaagtgtatttcttttcttttctcccttgctcctttcctctctttctccttcttccctccctccatctctctcttttctttctctccctctctttttgtttttgagatggagtctcactctgtcgcccaggctggagtgcagtggcgcaatcttggctcactgcaacctctgcctcctgggttcaagtgattcttctgcctcagcctcccgagtagctgggactacaggcacacaccaacacacccggcttttttgtatttttagtagatggggtttcaccatattggccaggatggtctcgaactcctgacctcgtgatctgcccgcttcagcctcccaaagtgctgggattacaggagtgagccactgcaccaggctccgtccctccctccctcccttccttccttccttccttctctctttctgtctctctttctccctttctctgtcacccaggctgaagtgcattggtacaatcatggctcactgcaacctctaactcctggcctcaagcaatcctcccaccctagcctcctcagtagctgggactacaggcacacaacatcatgcccagataattaaaaatttttttttgtagagatagggtgttgctatgttacctgcctcagctggtcaagaaccagaattgtatttctctcttgtgtaatgaaaggcagggttgtgggacatcttggcttggtgagaagatttagagataagagttcctcccatactgttgcttgccatatctgaacatggtggaggctgggttattgctaatccacattccagtccaagagaaagggcagagtccaagaaaagcagtaatcttttaagcaaatgactccaaagttacacctctcactccagctaacacttcattggtgagagcatggtcacatggccacacttacctgcaagggagtctgggaactgttgtctctagctgggaagccatgtgctgggtaaaactctaggattgtaggggaaggggaaaatggagtgcatggaacaactagcacttggccataagagagagaccagttagctgatggtggggtggtcaaaaagggtccatatttgagaactgttatctgtgaagttccaatcaggagactgattctgagagtgttggaaaaactgaaaactgggctgggcatagtggcttatgcctgtaatcccagcattttgggaggacgaggcaggaggatcacaaggtcatgagattgagatcatcctggctaacacagtgaaaccccgtctctactaaaaatacaaaaattagctgggcgtggtagcgggtgcctgtagtctcagctactcgggaggctgaggcaggagaatggcgtgaacccgggaggcagagcttgcagtgagccgagattgcgccactgcactccagcctgggcgacagaacaagactctgtctcaaaaaaaaaaaacaaaaaacctgaaaactggattcaagtgttgttactgaagtgatgctgccacagtgaagaagtaagcctggggtgactagaagaggaagcaaaaaggagcaagttcctcctgcttcctcctgccttgcaggctcccactggcgcccctgttaggcagagcctaataggaacccagctgttgaaggagaaatgtggttagtagagtctcaacccaggcatcacagagccggtgtcatggggtggagtttggagctaagagacagtaactcaacatctggcatacaagctattctgggtgtggcatgggcaagcaattggtgatggccatttaagcagaatcatggctgaggagggctcagggcagctgacactgggttctctgtcctcaggagccctccttatggacctggagaccccagaggagatgcaggctcggagcctgggcaggcccatcaaatcctcgtgagttgtccctggcccccatgacctctatcttccgcctccccaaatgtgatggcagtgaaccctgacctcagaggtccctgcctgttcgctctctccctagaaagcagtacctgcggcaggtcattgcagagtacgaggcactggaccgagaactcccgtgcatccggaagttccccacaccaccagcttcccagcccctctgcctctgcatggagaccttggtgagtggacctgtgcccttattttctgcacagttttggtggggtgatgggaagggcacaggctgagaagcagtgtggccagagtttaaattcaggcttttggcttataagctgtgggcttgccaccaggacagtttgctgaaaactgattgtgaatttgtcaaagggtcagtcatgaaatctactgctcatgtcagaggggagaccaacgggcaaagaaaggggaggctgaggggggcagggagggaggacaaaaggagtcctactaatccacttctgtaaagtttacaaatataacaaaaactcaagaaaaagcccatgtgtgtcgggtgcggtggctcacgcctgtaatcccagcactttgggaggctgaggtgggtggatcactagaggtcaggagtttgagactagcctggctaacatggtgaaaccccgtctctattaaaaatacaaacattaggcaggcgtggtggcaggtggctggaatcccagctactggggaggctgaggcaggagaatcgcttgaacctgggaggtggaggttgcagtgagccgagatcgtgccactgcactccagcctgggtgacaaagtgagactctgtcaaaaaaaaaaggaaggaagaaagaaagaaagaaggaaggaaggaagggagggagggaaaggaaaggaaaggaaggaagggagggagggaaagaaagaggtcatgtttttgacagattcagtaaactggtcctccctgccttcaatcagaagaggtatatatgagagtcccaggcactcaacaattgactgagaagagctgatgtcaataggtgcttactgtgtgccaggcacaggcctccaaggtaccctctcagctaatccgtgtaactctccaccctgcatacagggattgctgtcctcgttttagggatcagtctccaccccatcactccacttctttgtggctttgagcaagggactctccagcctcccctctcaccccagtcaaggaatgactttctggaagtgacatcatttttcagtgaaatcgtgaaaattttcatttcattttagttcctcagcaattttatgtgctatgacaactgttatcacccttgacatgctaatcacgtgatgcaactgtgtttagtgatcagtccacgtttctgaatgttaaatagattgacaagacatcaaaacccctatgacccttatcttttgactactgaacattcttaaaatgctaatacgaatataaaaggaaaggtgtgtaacttaaatcctggcagaaattttcaagaactttcaggcgcatccattgcaaattgctgggaaagtttttggtagattcgtaaagttggctaagttggtgaatcattcagccaactgttcattgactttggggcaaattggcttggtgagaattgatttttttggagaatgacctagagtgatagtagatgctttcccatctgagagataatctgtcgtctcctttgaccatagcgacagtaccctgggattaagagcgatccttgcccctcaaatgccacctggaactctgtggcaggttctgcaggtggggtctagggtggtgacttctgaacccaaaatgaaccaggaggccacgggctgaggttctctctccgacacccgcagcccgaggaggattttacccacctggaggtgctgcaagccctggaggcccagttaccaggggccatggagagcgggcgcgtgagcagcatccgctttgagaacatgaacgtcatctgtgggactgctgggcgccggaaccggtgagtaagcggcgggggcggggcctggagcgagcgggaggggcggggcccggggcgaccgggtaagagcgtggttggttttagagcgctgagggacgtggccaagagtgaaagcatgaatgggcggggcccggggcgactagataagagcgtggttggtgtaagggtgctgaggggcgggccccggagccactagataagagcgtggttggtgtaagggtgttgtgaggcggggcgacagtggagtgacagcttgggggggcggggccaggagggactagataagagcgagattggtgcagagccactgaggggcggggccaagagtgagcgcggttggaggtaaggtccggtgagatcagagagaaggagggatctcgagtgagtaggggcccgagtttgagtgacccagtagtgaccgggatagaggtctgagcctggaaaggcagctgtgagggggtggaagagactgagcacatagtaggtgtggggccaggggtgatagggtggggacaggcctggagtgcctagggtagagcgcagcctgcagtcgccagtggagggtcgggcctttgggcggtttgagatggagcctcgacagacagtgattaggacgcagaaccaggctaagagagcgtaaggagcctagagcgacccaggcgagagggcagggctggaggggagtttagggacggagcgatggtccgctggaccagggcctgtaaacgactccagggaccaggcagggactcttcgacgatcaaagccagggctgaaacgacctgcgagttccttttccgtccccaccccccttacaggtggctcatcgcggtcacggacttccagacgcgctcgcgcttgctgcgctccgggctcagtccccgcgggcttgcgcaccagatcgtgcgccacgacgacctcctgctgggcgactaccgcctgcacctgcgccgctccctggtccggcggcgcatgctcgaggccctgggggcggagccgaacgaggaggcctgacgcccgggcgggccccggcagcgcttgcgcaccgccccgcgggctggggccacccacccggagccccggaggacagggggcgttgccttcccaggaaggaggcggggccggctcgagggggtggatactgtgagtttaattataaagaatgacctggtacaaaagccatttctctctgcaaaatcttggtggggagtcaggggaagggaggtgatggggggtaggaatgaacccccatgttataatcccgcgtccctaatcttcctccagtccctgtacgtggacgcctgggtcccaatcccttgagggatgaactgaagcccgcgaaagggaagacctgggcaccggggctttcagcgcgtgccgagccctgtctcagcgagaatcagacgtcctcatccgcccccctcctcttcccctcccacccccccttggaagacaattctcgggcttttatttcaggttttttttctggatttttttgtgtgttctaggggttttgtgttttttttttctgttttttatattttcttcttttgttattgttcctctttttgctttttctctcctctccaccccgcgctgtccccgcattcggtccctccccactccccaccccgacctctcctcccccccccaccccctacaccctccccaaccccgcggcacccatccagaatgaacgagcccttgatagacgggcgccgcgcaggccccctgcggactgggggcatccgacaagggggagggggcgggtaggggtccagcgcggcctctgcccctctctcaccacccctcccccctcccacgaccctcccacgaggttccccgcagatccctgacatggtgaggggagggggcttgcagccccctcccctcatggacggagcgcccccccctctcgggggtagggggcagcagagggggaatgggcttggggaaggagggggagctcccttctttggcagctgaacatgggggggggacctgagggcaacgccctcccccctttacccacagcaggggagggggcttttcagggggaggggtggcttaacattcccaagccccgggaataagcggagagaggaagcgtgcgggaaggaacagccatgctggagggagagggagcttcttggagtggacaggttaggagagggcaatcttcgtgcaaaagggatggacagatggcccaggaaagacagaagagggaggatgtgaggaagggtgagggctggaggcagggagaggctcgagtgtggaagcatggtgagcaggaagccagtgtgcatagggtcttctctcaccaggaagagaaagagcttaaggaggtaagagaatccgaatgagaatggccgcaagagctgcttgtcaacaggaataaaaaataagcgtgtcaggaaaagaaatgacagttacagcccaagagtgcatggaatgagatgagtgtgcaaaaggaaagaagtggtagagctctcatccaggtagaaaagacaagatgcggtgtgcagccatgtcatggtgcgcaagaacattattaaaggggagaaacaaggcttccggagagcactgaaaatgctgggggggggggcgcgtgtgcaaaagcaagtgtgcaagagggttcacaaaagaatcaaaaatgcagaagggcaaagatttcaaacagaaaggggcaagggagtgggagcctggcaaagaagaagagaatgagcatgtgtgagagaaacagtttctgggaggcaagtgtgcaaaaggcgtgaccaaaagtgacggtgcaaaaggggcaagagggaaggcggggggtggggggctaggagtgtcatggtgagaggggagagttggggagtggaagaatctggggtttttaagaataagaagggaaagtgcttcaacgtaagaaaatggaggtaagagtgtgtcaggaggggtgcataagatagcaagtgtgcaagggctgagcaaagagcagggcactccagagaatgaatgatgtgcatggagtctgtgagggggagggaaaatgtgtcccaagtgtgtctgcaacaagggtccagagcgagcggggaggaggagatgtgaaatggagtgtgtaaaggagggccctggtaggggaaaagtgtgtaagcagcaagaagcagagaaggaggcatggagcgtgagaaaggaaatgcagcgtgtgcgaggagagcagagtgtatttgagcgggcctcgccagccagaagcaaaggcagaatgtgcaagacagcgagagggcaaatttgtgcaaaattgcagcccggggacgggaggggagagaggtgagcaggcgtgcaacggagcgtgcaagaggctgaggggggcagctgtgtgtgctggggagaggggaaggggggagagctgaggggcctggagagagtgggaagggttgttagaggggtggcaggtggtggaatccgagggcacccccttcccctgcggcctgggggacagtccccatccaatcgggctcagggctgaccctctatggctctgtctatcccctccccccagaataggcccttccctccttctcaattcccctctgtaatttctcctatcccccctccgctccccgcttcacacacacacacacactcttgtgtcagctgccccccttcagtgaggtgcaaatgtccggcctggattgggccacctggtgacctctggccttgggagatgagggcagggcgcagtttgaacagagtccctggcccggggagagaatgacagtcaggggtcagaggtcaagaggccagcaggctcaagagttctgtggacggggctggtccgtccaggccagccatcacctctccaggaagaatttgagagcccggtcgatgttcatgcggtggcccaccctggtcacacctagatcgacgtagtcctccttggtcaaggcgggcaggtgggagccatcgatctcgtggtccaggaactgggctcggtgctccgccaaacccagccactccagccaatcagccacgtcgaacttggtccagaaccccagaggtttagcgccaaacggcttgtccgggggcagcgagagcaggcgggtcggtgagagggagcgcgaggcccctgacaaggctcccccgagccccccggatatccccgggtgtggcggcacaaagactggggcgaaggggtcagccgagcctcctgcccctccagttggggagccacggatgtcaaagaggcctgggtagaggggtccggaaggcaggatgggcagggacgagggcctgggcgcagggctgaccttgtgctccgaggcgggcagcagcgaggggctgggggcccggcggagcagagggggccgcatctcgaactccacgccctggaggtggcgggtggacgtggaggaggaggaggctgagggtgaggtggcccctggggccgcagcggctgtaggggagacccctgttccggtggggagtggcggcagaggtggtttgggccagttctgaaacaggctgctgacaggcttggagaggagtgaggactgggagtcgtcggagagtctggaatgtgacaagggggcagtgggggaggacagggatttagggggcaagggcaggggtgagaaagaggcagaggtcaagatatagggagagaggaggagagacataagggtagggggagagacggaggagagacgggaagaaatggagggagcaaggggtaagacggccggccgtcgaggaaagaaatgaagggagagaaagatgagaggacagggagagggcgacagttaagagagatgaaagaaaaagagacattaagtgataataataataatcgtcaccgcttactgatgctcacgtgtgccaggcattgttctaagtgctttacatgattgcatctcagtttaatccccacgacagccctgatgcaggttactattattatcagcacagagaggttaaataacttgcctaaggacacacaggaagtggcagagcccggttatatggcaccaaagtctgagctcttcaccactattctatactgcctttcaggttatggccagtcgtagcagagtgaaagatggggagacagtgagagagagacaaaaagagggtgagcatccaggggagagagatggaagggacaggggacacagagagagagagatgaagagagggagatgaaagagagaagaaacaaggggagaaaaaggttcccctcatccctttcgttccctcccctccagcactgtcccacctcagggcctttgaactggctgctccccctgcctggctcactcttgccctgggcagctgctccctctccactttcattactctgcccaccttgcctgttacatgagagaccttctccacccatcccattgtggtagctttttttgtaggatggttgcaattattttgtttactgccccgcccccactcctatgtccctagactatgagccctgtggagttgcacagtctttgcctgtcctgtccagcaggggatcccatcacccagaagggcactctgcacacataggtcatgagtcaataattaatgcaattgttgactgaattaagcatccttcctgttgctgctacaagcagtggaaaaaaaaaaaaagaaaagaaaaaaaaaatcctcttctctaaccagaatacttaagaatagtcaaggaattgcattcagttcttaaaggcctaataaacccacatttgtttgtttatttttacagcgtaggagcattgattcaagttgctctaataatatacacttcctttttcttttctttctctctctctctctctttttttttttttttttaagacagggtctcactttgttccccaggctgcagtgccttggtgtcatatcagctcactgcagcctcaaccttccaggctcaagtgatccacccacctcagcctcctgagtagctgggactacagaggcaggccactgtgcccagcctcctttttcttttctttctttttttttttttttcaacctgggagcatagatttaagttgccccaaatatacactccctgaacccacatttgaaggtcagacacatttggatagcagaccttcaaacagaattcaagtgaactctgtagatggacaaggatatttaaaacctgctcccaaccctctgtgtatctgaagcagaaatgtaactctactttctctaggactagaaggtcttgaatgggctcgaattctgcgacgatgcagctgactggctgctctgggaagcatctgcatcatcccgtatttccccacgtagaagttgctgggctcttgttcgaggccccctcttcccccatcccatgttacaacaatggcacacactaaatcctctcaaaaactctttgggctggcactaggccattccacttctacagagaggtggattcatttgcctaagatcacccaggtagaaagtgcagggttgggactggaagctgagaaggtgggctctagaaccacacctataactgcatcctgtcttgaaccacactggcttcaagggactcacagatttcagggactgtcagaaagaagtggcagctcaccaaggaaacaaacataagcaggtctcactccagtctcctttgttaataactttttttttttgagacggagtctcactctgtcacccaggctggagcacagtggtgcaatcttggctcactgcaacctcggcctcccgggttcaagttattctcctgcctcagcctactgaggagctaggactacaggtgcccaccaccatgaccggctaattttttgtattttttttagtagagatggggtttcaccgtgttagccaggatggtctcgatcttctgacctcatgatccacccgcctcagcctcccaaagtgctgggattacaggcgtgaaccaccacgcccagcctgttaataactttttgttcatcatgggatgtaggttgtgatggtgatgggcagagacaacagaagctactgaaataaatggaaatttaaaggctggacccagtggcttacacctgtaatcacactttgggaggtcaaggcaggaggatcacttaagcccaggagtttgaaactagcctggtcaacgtagcttgtctctacaaaaagttaaagaaaaaatggccagggccaggcatgctggctcatgtgtggaatctcagcactttgggagaccgaggtgggatgaatcaccttaggtcaggagttcaagaccagcctggcccacgtggcaaaacccctcatctctactaaaaatacaaaaatttgccgggcatggtggcgggcacctgtaatcgcagctactcaggaggctgaggctggagaatcgtttgaacctgggaggcagaagttgcagtgagctgagattgtaccactgcactccagcctgggcaatagagtgagactctgtctcaaaaaaaaaaaaaaaaaaaaaaaaaagaagaagaaaagaaaaattggccaggcatagtggcgtgcacctatagtcccagaggattgcttgagcccaggagtttgaggctgcaagtgagctatgattacaccactgcactccagccgggtgacagagtgagaccctgtttctaaaaaaaaaaaaaaagccaggcatgttggctcatgcctgtaatcccagcactttgggaggccaaggcggatggatcacctgaggttgggagttcgagaccagcctgaccaacatggagaaaccccatctctactaaaaatacaaaattagctgggtgtggtggcatgggaggctgaggcaggagaatcgcttgaacccgggaggcagaggttgtggtgagccgagatcacgccattgcactccagcctgggcaacaagagtgaaactccctctcaagaaaagaaaagaaaaaaaaaaaaagaaaaagaaaatatttgtgaaagcatgcttctgtgacagcaaactcctgccaacctggtttctgtttcctttctgccaccctgagaccctaaagggacacagccatgccatcaacacctctggcctcccttgttggccaccagcccccgcttacctctgccgctgcagggaggaggtcctctcggggacatagctggctcccccgtggtggctgtctccgcctcccccactgcctcctcgggcccagggcagagcgccgccagctgccgaggagcccccaaactgctgaagcttggagctgagttcactgatgatgctggcttttactgtggccaaggctgaggcctgaggctgggccaagggcccgggcagaggtggtggcggtgggcccgggccctcctcccagggcagcagcttccggggcagagaggaggccgtcggcaagggcaccggtgggacttctggctctacagccaccggaccccccgccacgcctgccgtggggggtcctgaacaagcacgcagggccagcagcccatcggttccagcccctgtcaccgagacggtggggctggtgggggtaacagggtctcggagtcccccgctggggccaggccgcaggcctccgctggctcctagcgcccggccccggagcttagagggagtcatgagctgaggagggtatggcgggccgggagtactgctgcccccaaaggcctggccgtccaggtaggccacataggtgtccagaagctccggcccactggccacaccggccccagccccgcccccaccccctgcgctgccaccaccttcggcagataggctgctcagcgtggaggcgctgctgatggtctccagtgggtggtcactgctgctccgactgtccacctcctcgatgccagaatccgtgccaggcggagggtccgggccaggctgtggggcagcgggagccggtgctgctggggcaggcgggcctggtggatgggggtccccaggagcggcggaggccccctgggtcagggtggccacctcgctgtcataggatgtcaggctggatgcggtggagtccagggtgggaggggctgcggccacagccgggggtggcacagggggtaacggggtggcaggggcaggtgtgtcgggcagcgggtggggaggcccaggcgtgaggggcgactctggcttttcgaagctgttggagaattccagaggcggaggcagcggttccacgaaaaggaattcgccatcttccacatccaccgagggggcgggaggcggcaggaccagcaggggcagcccgttctcttcgctggccctcggggaggtcggggaggggggcacggaccggcgtgggctgggcggcgggacccccggcccgtcctccgaggggggaccccttccgctcgtcacaggggcccggggctggcagttttcaaggaaccgcacgtgcagcggcagccgctcgggttcttcgggggctgcggacctccagggcttgcttactccggggtgcggggccgggggctccgtccccagctgcagcaggaggggccccaccccgggagcggtgggcggcaggcggtgtagcagggaacgccgggcggcgggcgggctggcgggaagggacttctcctggctgcccagcccggccctgtaccccagctcccggcgcgcagggtccggcggggaggccccccagagacgcagcactggctcgtggtgggcgtggggcgagtggtggtgcggggtgggcggcggggcctcgtagcggggcgatgggggcctgggaggcggctggggggccccgccgccctccgaggactccttcagcgctcgctcgcgggcggccagggccagccccagcggggaggcgggatccagggccttgccggtcagcgggtgcaccaggggtcgcgggggcaggaagctggtgaaggcgctgctgcccccgccacccccgtaggctcggctaccggccccgtagccgccgtagcccgcgccgctgcccgcagactccagtcggaggtagggctcggcggagaacatgccctcgtcgatggatttggagtggcgcagccgcgggcccggggccgcccctgtgcccagcccgccgtccccgccgtcctcgtcccccgcgtcggtggacaggaacagcgtggagcgccggcgcgcctcattctgccagcccccctccctccgggccgcccccaccagggcggccccgaactggctcgtgaagtccagcgtggccgggccgctgggcgaggcgggggtgggcacgggcgagggggacgggggcacgggtgacatggccggggcggggctgggcgaggagccgccgccgccgccgcctcccgtgggctccggctgggtggggggctccgcctcggtgctgctgccctggctgctgcggccgctgctactggtggacggggccttgatgatgatggtggggatggggatggagttcttctccgagggcgcggccacggcgggcggcggctgcggggaggccggggacgtgggcgacggcgcgggcgggaggccgccgcccttctggggctcgccttccaccttggtctgcttgaccagcgggcccttgcggccgcggcccgagcgggcgggcacgtacatggctgcgctggccgcccgcgggggcagctggaaatagcgtagagccgggccctgggaggagccgccgcccccgcccgcgctgccgtggtgcgatggggacggggcccccggggtcgggctgggcccgccgcccctccagcctcgcaggctgggctggggccccagagccaggcggggtggagggtcgtcgggagagccgcctgtctccatctcgggaggatgaggggggtgggcgtggtggtggtggggctgagggggcggggcgtggtggtggtggtggtggggcgggtggtggtgggccgggggcaggggcccactgtggtacaggctcttctcgcggctccccacgcgagtgtcgggaggggagggcccgtcaaaggatgcaggggaggaggcggggagggggccaccagagccagggttgaagggccctccccgaggggagggggtgaggcgccctgaggaggaggggactggaggtgtgctgtagggaggctccggtggggacgtggtgggtggcgggggaatgtcctccgaaccaggcacagacaggctgcggctgaatttcatggctgggggtgctaggtaaggtctgtcatcttctgccgcacctggggagatacagaggctcaaggagggggaccctggcggggagggtctccctgctccactatcccatagaaccgcaacaatactaatgacaagaatggcaccccgtatatgccaggaacttcacgtggactcgcccagctcttccctatttgaggtaaacccaaatctgcttcatacagaggtacaggttgtgcactgcacaactgcaaaccgcaaggaaggtgaggaaactgaaattcagcagaacttcctccccacgccaggagggggcgccattttctaattccgttcaaaggctcagtgaacggtttggggccagcaaaagtggctggagctgggaagggatagtcccctcgtgtttatgcatagatgcgtgtttcttttcacgtatatgcgggaaagaaatgcaaccagcacatcaaagctgtgattctacagagagaaccacttatgatgaggctaaagtttaaaagggattggatctataaaaaaaaaaatcaggtaaacgatgcgagccaggtggaccccacactcagtgggagtgtaagactcacactggtggactttgaacgccaggagttggggaaagctgaatccaatcagggaaaaacaactccaggaggcgtgcaggagttaagtctttgcttacttcactgccaaggctcggtctttgaacctcttctcacctctgactactccctctcaactagtgaccagcttcattcactgcctttctgctgtcgacgcccacgtttatgcctggggccccatcctccgccctgagctctgggcccctatattcaaatacccacacccagctggctgtctcacgggcatctcagactccaaacgctccaacccaagctcctgatctcctcaccaacagactcctcccagcccacggtccctccccaccaccgcagcaaacagcagctctgtcctttcaggtgctaagactgaaaaccttgcagccactcttagctttcttcctcaagtcacccacatccaatccaccagcaaatcctgttgtttcaaaacatatccggaatccaatcccttctcacccctccagagtcaacaccctgggccagccactatcatttcctatctggatagcaatagctgtcacctcctctttggtcccccggcttcccagctcatccccttcaatctagtcccttcacagcagccagagggtttctgttaaaaccgaagtcagctcatgtccctcctctgcttagagccctgccattcactcacctcactcagggcaaaggttcaagtcctcaccatgactccccagaccctgcaggatcgggaccctgtccccccactgccctcatgtccagtgctcacttggcccctgctacacaggcctcctccctgttctgtaaacgcaccagactcagcccgacctcaggacctttgcagaggtagttcgctctgcctggaatgcctcaaccccagggagcctcacgattccccacttcatctctaggtgtttttttttcttttctttttttttgagacagagtctcgctctgtcgcccaggctggagtgcaatggtgcgatctttgctcactgcaacctctgcctctcgggttcaagctattctcctgcctcagcctcctgagtagctgggattacaggcacatgccaccacgcttggctaatttttgtatttttagtagaaatggggtttcatcatgttggtcaggctggtcttgaactcctgaccttgtgatccgcctgcctcggcctcccaaagtgctgggattacacgtgtgagccactgtgcctggcccatctataggttttagctcaaacctgcaccctgccccctacccagcactccctatctctcttaccttactccattattttttttcactctttttttttttttttttttttgagacagagggttgctctgtcgcccaggctggagtgcagtggcacgttctcggctcactgcaagctctgccttccgggttcacgccattctcctgcctcagcctcctgagtagctgggactacaggtgcccgccaccacacccggctaattttttgtatttttagtagagatgggattttaccatgttaaccaggatggtctcgatctcctgaccttgtgatctgcctgcctcggcctcccaaagtgctgggattacaggcgtgagccgctgcgcccggcccactcttttttttgttttccatagcacgtacaactgctaacatactagataattttcttgcttattttccttataatccattatctgtcttcccctgctataaggcaagcccatgagggcaggaacctttagtctgttttattcgctgacgtatccccattctagaacaattcctggcatgtggggagcgcttggtaaacacttgtaaaatgaatgaatggatggaatcgggtataagagaaacaaccagaaagctgtagcgggggctttagctcactgcatccccattctccagatgtagagccagaggcccagagaagtcaagccacctgccccagttcacacagctgggaaggaggggagccaggattcatggccaagttcacccatttccaaagcctgaactcttaacccaatttgatgaaactatggtctctctgggagcacagaacatttccaagtctgcttgcttttcctgaactgtcacgttcctggcctcccccagcccccacatctcttcttctgggtggcataccgatagatttttgccggagcatcaacccaggtcctggaggcaggaaagaaggacgctcgtaacttggctgggcacggtggtggggatcgaagctcgactttggagcggcagtcagagggggagagagagaaaagatagagagagatcagtcagcgcagaaaggcttgtggcttcactatacggctgcccccattccttccctaagcccctgccgtaagggagagcagtgtgaagacggtggaaggaggccgggcaacgtggctcacgcctgtaatcccagcactttgggaggctgaggcaggaggatcacctgaggtcaggagttcaagaccagcctggccaacatggcaaaacctcgtctctctactaaaaatacaaaaattagccaggcatggtggcaggcgcctgtaatcccagctactcgggaggctgaggcttgagaatcacttgaacccatgaggtggagaggtggaggctacagtgagccaagatcacaccactgcactccagcctgggcgacagagccagactctgtctcaaaaaaaaaaaaaaaaaaaaaaaaagaaaagaaggcgaaagggaattctgcgggaatgaaaagcctcaagtctgggcaggaaggagaaagaaaggagaagaaagcagattttccatcgactcttgatctgcttccttcctccagccactgcccacatccaggtccccaccagtgttctccgggatggagcagcctcttccctcatctccctgctgccatccttgatcccccaccctgttccagtctgttttccacacaagagtcagaggcatctttcaaaaagcatgctattgcccctgcttgaaatcccatgtcagttaggaggagatcagaggggaccaaactcccaactctggtctacaagaccctctatggcaggcactgctggtgcccctgcagctgccctccccctggatgcagcatcccatccctcacccactgctgggagggtcacctgcctgcagcccttaagaatcaccctccttcagagtcctggactcgcccagtccgttatgtgtccctgcttcctggagcagcccacagcccacgatggacggatacggaggcccgaggcagcactaaagccggggtgcccagcctgaccccatgggttcccactccagcgtgaaccgtgtctgcttgacttccttccacaaccccagccagtctcccacactccctgaaggttcccccgtagcaaacccttggtacaggaatccccacctccggctcccgttctagggaagcccacacgaagacaggtcctgcaggcgggacccagccctgcccccatttcccacttgctcccttggtccacctccacccccacctcttccttctcctctgtcagccccaggtctaccctcattggagaacacctgcgagccctggttctctcggcaacagctttccctcttattgtcacagttccttttcagcgcgaagttctcctcggcgagaccttccccggccccctacccagactgcacttccctctgtcccattttcttcacagcatctctcttccccagaaaccatcttgtttacttgctgtctgtttcctccactagcctagaaactccctgaaggcggggctgatgtatcccaggcatcgcacctacagtgtctagggcccatgatgcttttaggggaagtgttttcatttcttttcaaagtagaagtgaaagaaaaaaagaaaagagaaaattgtaccctggataatatcggtctttgcagcaacaaagtcataaaatttaaacttttttttttttttttgagacagggctggagtgcagtggcgttaacacggctcactgcagccttggcctcccgggcccaagcgatcccaaccccaaccttctgagtagctgggactataggcaggcacaatcacatccagttaatttttaaatttttttgcagaggcgagttcttgctatgttgcccaggctcatctcaaattcctgggctccagcgatcctcccactttggcctccccaaaagttctcagattacaggcatgagccaccgtgttggcctattttttttttttttaatgcagaagggcaaaagtgcctaaggttcatggaagtcattatgaaacctgcctgagggtagggtagtgactttatcagtctcctttcctactgagtccccggtccccgcatagggcctgctgttctacaagcaagtgttagatgagtaacagggagaatcagccaaggtcaggcacttcggggccctgactccccagcttctgccaggtcaccccatgtgtctcccttctccatctttgagaccagaagtgcagagaaagggagccctctcggaatgaagttcgcacctttgggatgaacccttacttcctgcacttcccactataccccctcctgcctctttcctccagccattcacaaccattcccagttccctcgcttctcacttccgagactctgcatggagcatcctttccctgggctctgggctctgcttgggaaagctctgttatcttagccctccaccctggcccggctacccgcttcctttaggcctgcagtgcccccctagagcagccactagccattcaactgtacatttcaggccaacgtggtggctcatgcctgaaatctcaacattagggaggatcgcttgaccccaggaatttgagaccagcctgggcagcatagggagactctgtctctacaaaaataaaaattacaaaaattgctgggcacggtggctcatgcctgtaatcccagcacttcgggaggccaaggtgggcagatcacctgaggtcaggagttcgaaaccagcctggccaacatggtgaaattccacctctactaaaaatacaaaaattagctgggagtggcggcatgtacctgtcatcccagctatacaggaggctgaggcaggagaatcacttgaacccgggaggcggaggttgcagtgagccgagattgtgccactgcactccagcctgggtgatagagcaacactcggtctcaaaaaaaaaaaaaaaaaaaaaaaattaaccaggcatagtagcacatgcctgtcatcttagttacttgggaggctgaggtgggaggatcacctgagtgcaagagttcaaggcttcattgagctatgattgtgccactgcactccagcctggatgacagagtgagactgcgtcattaaagaaacagaccaaccaaaaagacaagtgtaaatttcaattaattaaaattaatttgtaaaattcaatttctctgttgcactggccacatttgaagtattcaacagttacctgtggctggtggctaccaaattggacagtatagatatggaacatttcatcatcacagagagctctattggttctagtccagagtttcctggggtctgtattacatgcctctcactacacttcccttcctgaattgggactgtctgtttctatgtttgtctcattgattcattcattccagaaatatttattgaggacttcctttatgccagggactgtgacagatactgcagatacgacaaattagacaaatgtcccagcccacaggaagggcaagcaggccataaacagcataaattcgtaaaatataacattggtcagatggaggtaagagggaggagagagggagaatgtaatttaaaatatgggctggtgccaggcgcggtggctcacacctttaatcccaacattttgggagttcaaggtgggtggatcatttgaggtcaggagtttgagaccagcctgaccaacatggtgaaaccccatctctactaaaaatacaaaaaaattagctaggcgtggtggtgcatgcctacggtcccagggaggctgaggcaggagaatcacttgaacctgaaggcagaggttgcagttagtcaagatcgtgccactgcactccagcctgggtgacagagcaagacttcatctaaaataaaatagaataaaataagggctggccaggcacagtggctcctgtctgtaatctcagcactctgggaggtgggaggattgcttgatgccaggagttcgagactagcctgggcaacatagcaagaccctgtctcacccccaattttttttttttaattagtggtgcatggtggcatgtgcctgttatcccagctacttgggaggctgaggtgggaggatcccttgagcccatgagtttgaggctgcagtgagctatgatcgtgccactgcactcctgcttgggtaacggaacaagaccttgtctcaaaataaataaaataaggaggtcaaggaaggcctcactgagaaggtattatttgagcaaactcctggaggaggtgaaggagggggcataatgatgtgtagaggaacagtgttccaggcaggtggaacagcaggtgcaaaggccctgaggtgaaggtgagccaggcaggctcaggaggaataggaaggaggccaggagctgaagggtaggagttgaggttagacaggtgatagaagggtgggagtgggtaggacctgcaagtttcaggtttctttcagatttcggctccaaggtctcctctctggagaggcttcctcctgttactctgtcataactcctttaactgatgacagtttggagtcatcatcattatttgcttgcttgtttactgtctgtctccctaggcatgcagcccaccccaatactctttctactctatttccttggtaagaaaatgccaatcttatttggcaccttttgagagactacacttcccagcttcctttgcagctaggtgtggccatatgactaaggaaggccaaccgggatgcccaagtgggagtgttgtgtgttacatctgggatgtcttggaggtaactcaagaggcagcaaggtgccctcttttgcccttctgcctttctgcccttccttgttcctgctacctggaatgctggtgcaatagctagagctccagcagcaattttggactatgaggccagtctgcagttggaaacatggctaagatggtggagcagaaattgagaaggattctgggtctttaagaccatggaggctgctaacctgcctgagacttcctatctcatactttttttttttttttttgagatgggagtctcactgtgtcacccaggctgaagtgcaatggcactatcttggctcactgcaacctccacctcctgggttcaagtgattctcttgcctcagcctcctgagtagctgagactataggttcccaccaccacacccagctaatttttgtatttttagtagagacaggggttcaccatgttgcccaggcttgtcttgaactcctgacctcaggtgacccacccaccttggcctcccaaagtgctgggattacaggtgtgagccactcatgcctggcccccatacttctttaacaagagagagataaaagcatttttcttggtcaagccaccattatttgctttttctccctcaggtgcagcagaacccaattctgctagtctcctctttcaaatgtaaattctctaaaggaagttactttgtttgactgattcactcttataccttgagagcccagcagcaggtccaggatatagtaggtgctcaataaatatttgtagaaggaagaactcattggaagcaatacaagacaccctgacaagatgtggcgagcaactccagggcaaaaccccagcctgttcctctgaacatccccatcaaacagcacagggccagctccaagcaggcttcaggaggtgtcgcctgaaggcatccctgctttgacggatttcctgccatgctgctcttctctaagcgcttctcagcctgctcaatccttctccactttgctgaatgtttttctgaccccctcccccacctccttcagccacagaccaatactctgcttggctttctgtcccgtcctgcagctgtgtggtatcagagagcagaaccttgcaaaagataaaggcagtagagaagtggcaagtggaaggagacactcttgtgtgagccattttacctgctatttttcgtatgtgtcctcactggatcctcacacctgtgagttagggtggattatacccatttggatgataatgaaagaggccgtggatcagagagaaaaggtccttatcctagaccagccagcgagtaaggaggagattcaagatgcatcggagaaaagaggtcagagtggctcaaaaaccctgagataaaatgggaggggtacgaagagccaggagaagggggtgtgaccagtcaggaagcacacggggactgctgaggggcagggctggagaggacagcaagaacagagtccaggcaggagaggacagctgggaggaggggaggaaggcaagggaaacacctgcatggggcacgggggcaggtggtgggggccagagggagaggcgagggtcaggtgacaggtgagggtgaaggtgatgaggcagggatccgagtgacagtggaggggttgatgtgacagtggaagggtcagagtgacagggaagggaccagggtgatgggggagaggtcaggatgacagggaagggtcagggggacagtggagaggtcaatgtgacagagaaggggtcaggtgacagagtaggagtcagagtgatggggaagggtgagggtgacagggtgggggtcagggtgagagaagaggtaaaagagagacagtggaggagtcaaagggaaaacggaggggtcagggtgatggggaaaggtcagggtgatggggaggggtcagggtgatggggaggggtcaagatgatggggaggggtcagggtgtggggaggggtcaggatgatggggaggggtcagggtgtggggaggggtcagggtgatggggaggggtcagggtgtggggaggggtcagggtgtggggaggggtcaagatgatggggaggggtcagggtgatggggaggggtcagggtgtggggaggggtcagggtgtggggaggggtcagggtgatggggaggggtcagggtgatggggaggggtcagggtgatggggaggggtcaagatgatggggaggggtcagggtgatggggaggggtcagggtgtggggaggggtcagggtgatggggaggggtcagggttacaagcattacaggtaaggggtgagggtgatgggggggtgtcagtgtgacggggaggggtcagggttacaggcaaggggtcagggtgacgggagagggcttagagtggcagggaactggttagagtgagggggaggggtgtccccgacagaggagggtgcagagtgacagacgcctcgtcagatttgcaagctgacaaaagacacttcagcaccatgtggaagaagaagggacaaaaatgggttagcttgacataagaagggtcagggtgacaggagagatgtcagactgacggaggaaccataacaatctgatggggcatcgcactgactccccagggagcacctgaactccaccaaccaacgggagcattcgctcccgcgcagaagggacagccaatcagagtgcgcagccttgcatgacgtcactggctgccgggcagactccccttcagtccgccgcccaaaggcccagttctccgtcacctcgtggtctggcgcctcagtggcagcgcatgtcctgccgctgaccagtggctggggaactcctgctaaggaggcagccctgagaggggataggggagagaatggacggggagacaactgaagagacagagatggggggacagagatagacagagacagagagagggagacaaggagacacagagacagacgtagagagacagaaaaagagagacagagatagagagacagagacagacagacaaaggcaaagatggggagagagacagagatggagagacagagacagagacaaaggcagagatagggagacagagatagagagacagagagacaaaggcagagatggggagatagagatggagagacagagagacaatggcagagatgaggagacagagatagagagacaaggagagagctagggagacaaggagacacagagacagagatggagagacagagacaaagagacaaagacagatgggggagagagggaggtggggaaacagggagggatgggaagagaaagatagggagagtgagagaggcgaagagcgacagacagagatggggcctagaagggggagagacaaggactgagagatgagaggggaaatgagagggcgatgggaagcatgggaagcaggaagagcccagagaggaaggagggagggcagctctgactcagagagggcctgcgcagccccaggagggaaccccagaagtggggagtgcaactgagagggagcaatgacgtctcagactgagagatgagggggcacgagggagccctcgggcatcagtggcgggtgacaaagacagtaccagagaaagccaaagccataccgaggggcggatggacagcagagccctaggaggagacagcccaagaggtgccctgacctagggtggatctgctgggctccgcgcccctgctgtccctacctcctctaggttatatgcaaaagtgcatctttggagagggttgaaatctcccagtttccaagtccttagatagtggcatctttttttttttttccccgagacagaatcgcaccctgtcacccaggctggagtgcagtggcgcgatcttggctcactgcaacctctgcctcccaggttcaagcgattctcctgtcccatgctcccgagtagctggaataacaggcgtgcgccaccacacccagcaaatttttgtagttttagtagcgacggggtttcaccttgttggccaggctggtctcaaactcctgacctcaggtgatccacccgccttggcctcccaaagtgctgggattacaggcgtgagccaccacgcctggctgatagtggcgtcttatacaatgctttgctcttgttcacttttgtgcagacctgatccaagaagcctcggggggtactgcaccccccaccccactgcatctagaccagagggaagatgcagggtgaagaggggagaggagcctaaatgaatgggaaatcgagacaccgagaacaagaccagacgtcgagagaggccaccaagatgcagaaacctcatgaaggggcatctgtattgactcagagagcgggaaagataaagatggcaggtgggaaggagcagagaaggcggcagagagagcctccgacatgagagggggacctggagaaggcccagggacagatccaagaggtgagagaagaaaaggcgagggggatgtacagggcaaatgactatgggtcctctggacacagagggaaaggaggtctcccagaactcaggtgagtgcttgtgagtttcatttctaggaggcaggggcaggtgggcagctggttttattactggctggtgtctgggctcctctgggggtggaggtctttggagctcagagggtgagttccctgagggttaggctcttgactgtcctgtaactgggttcgtgcagggtagacctagaactgtggctgcctggcactttacaggagctctgcgcatttgttgaattaatgaaaacaggacttgctctaattagtttatcagagatttacactcagtctgatacgctattgtggggtctctggtgttgcggggtctctggaggcatacacagagatcactggtgagccatggtggactttctagtttattttatttcagtgaattaatttatgtatttattgagacaggtctcattctgttgcccaggctggagctcagtggcgcaagcatggctcactgcagctttgacctcccttgctcgagtgatcctcccacctcggcacacaccatgactggctaatttttaaatattttgtagagacagggtctcactatgttgcccaggctggtctcgaactcctggcctcaagtgatcctcctgccttggcctcccaaagtgttgggattacaggtgtgaaccactgtacctggcctattttcttttccttttttctattttttttttagacggagtctcgctctactgccaggctggagtgcagtggcatgatctcggctcactgtaacctccatctcctgggttcaagtgattctcttgcctcagcctcccaagtagctgggaccacaggtgcacaccaccacgcccagctaatttttgtatttttagtagagacggggtttcactatgtttgccaggatggtcttgatctgttgcccttgtgatctgcctgccttggcctcccaaagtgctgggattataggtgtgtgccactgcgcccggcccagcctggcctgttttctatcctgaggggtttaccttctgttgggagtttgctgtgttacagttaacctcatggaaccctcataagaactgggcaagtttcactttagccccattttaaagaacagaaaactgagatgcagagaaattaagtaacatggtccaaggtggcaaattaagttagaggaagtcaggatttgcatccccatttgtctgttaatatagagtttctgggggatcaggaacaaacagaaacacctggggtatggttagagacccagagagggaaattcagagggaggagagtgtaaaatacagactggggggaggcatgaagaaatgggattagtgggagtacattccagacttccaataaatactgaataatttagtgagtgaatatggatggtagcatcctgaatctaagtccacttaggataatcctggggctgaaaatctttttaatctttttcgtttgtttgttttttagagacagggtggtctctctctgttgcccaggtgggagtgcagtggcacaatcgtggcttactgcagcctcaacctcggaggctcaggtgatcctccctcttcagcccccagagtagctaggactacaggtgcatgccaccacatctgcccaactaattttttgtatttttagtagagatgggatttttgccatgttgcccactctggtctcgaactactaagctccagggatcagccagcctcagccttccaaagtgctgggattataggtgtgagcccctgcgcccggccctgaaaatcttttaaccttagaatgatacagggcagtggttctcaatgagaggtagttttgccccccagaggacgttgggcagtatttgctgctggcatccggatggtagaggccaggggtgctgctgaaatcctacaatgcacaggacaggcttccacaacaaagaattacgcagctccaaatacaggcaattgtggctatatgcagtagttgtgttatatggggttgccacacatttccctcaaccaatcaatacataaccttgttttatgcatgtttctgttgaaggatgccttatttaatatacattgttgattcattcacatccaactcctggccaccagtgctctaactcatgcctgaatgaagcttctctaacatacgtattttctccataaggcacatcacggccttctcgcacttaggaacgctagacagctcttcagcaccatgcttgggggaccttttaaacgctgatatcaccactaaaaggcccaaagatgcaaagcacgtggcactaaacagaccgagaaaagacactcgttcacagtataagagccgaaatgagaaggcaccctcgttcagcctcgtctgggaacccacacatagggctactcaagattttctctgctttgcgcctgtccaagaataaccacaaaagcccttcgcgtattgattctgggcttctaataaatttcagcgagtaggcaaattcgcagacacagaatctgggaatcatgagggccaactgtgtcaacagcgcagatgttagaaactatgacggacaggaagaggtcttggactttggttctgtcttgatgagagacacacttgatgaaaggtctcaggcaagtgaatgcaaatctctaagactgtttcatcttctgtaaaatgggaatgtgcatgctctgtctttctttctgtttctgtaccgccctttccttcttaaagctggttgtgaagaagtttgttgaggaattatgagaagtttgctgcagggcagttgaggatagaagaagatcacaggaggaggaaacagggtcaaaaaaggtaagagcccaggggaggtagatttggactccatataaggaagaaggtttttttttttttgagacagagtttcgcttttgtcgcccaggctggagtgcaatggtgcgatctcggcttactgcaacccccgcctcgcgggttcaagcgattctctcgcctcagcctcctgagtagctgggattacaggcacatgccaccacatccggccaatttttgtatttttagtagagatggggtttctccacgttggtcaggctggtctcgaactcctgacctcaggtgatcagcccacttcagcctcccaaagtgctaggattacaggcgtgagccaccaagcccagcctcctactcttgatttttataaaagtacgagcccctccagagcatgagggattgtggatagacttcaggggcctgtgcacttgtacaggaaaaaaaatcctatgtcttcattttcatcatcctccaacaaaaactcaacctttcctcaattaaatatgtaagcagcaaaccatgctagtttcagcaagacccatgcctgtatccccagtaggaatcacagatatctccatatcccatcacagtggtgcagatttcccaaaatagtgtttatgcgcctcgtgattttgaaattagagttgttaaaatccaccgccaatgtctaacatgttgacaaaaaaagatgatattatgatatcacaaattttgcttttgaaaaatattttgagaaactacattttagtgtaactggcctcttttgttatttcatgttatgcatttataagcattattctgagaaggaccacggcagcctgccaaagagatccatgaccccctaaaagccaaaggacccagttttagagtaaatggacccctgaccactacgtggtggatgcggccagaggatggggactgggcagagaagaaggaagcgggaagggaggagcaaggcagagcgtggcctctggaggagacagttggagggtaaggggtggcactggcaagcctagtgggggatgtgttggagggaaggcacacagcccagtggagtaggggcaacatccaggaagggagcagcaggcccctaccaggatagccagggctgtggcaggaccatgggttcagagggctgcctgcctgggttaaaatcccccctccttccttgagcctcagtttccccctctgtaaatgggctaacaacctcgtgtacctcccaggatgaatctaaggaatgaatgagataatccatataaaatttgatgtctggctggtggctcacgcctgtaatcccggcactttggagggctgaggcgggcagatcacttgaggccaggagtttgagaccagcctggccatgatggcaaaaccctgtctctattaaaaatacaaaaattagccaggcatggtggcacacacctgtaatcccagctactcaggaggctgaggcaggagaatcgcttgaacccggggggcagaggttgcagtgagccaagcttgccccactgcactccagcctgggcgacagagtgagactcagtctcaaaataaataaataaataaataaaaattgaaaaataaaataaaatgcagtgtcccccaaattatcaacaccccctacaggttggcctctggttgtggggagaggcagacagagtggcaacagacatgaccattcatattttaataagtactacgtgttgggtatctattattatgccggggaatctccatccatgacatcattttgccttccttgagacccttaagatgggacgcagagggacacaaagaggcggggcaagagctcaagtataatagcaggggtggaaagtggagagagaaaaggacagagatgggatttgagggaaaggggataaggaggaaaggaggtctccaaagttgggagaaaggaggaaaccctaggatgtgtgtcgcccctccaggaccagcctaaagcacagaggcgtcaggagggttttggaaagagaaaggctccaggttggtgtgtgaaccgcctcccccctggcagttcctccccacaccaggccgcctacctcagtggcaaagaaacctttgggtcggtgtttgcccagggacgcgaggccaccgggaccagggctttcgcttgcactgatggtctgttgagctgcggccaggatttcgtccagtttgtctaggggtagatgaatgaacagaggtgggaagacaatgaaatgaagtttgctttgacccgggccgcaaagaccagagctgccgcccgcagttcatccagcacctggatcaaccaggaaagggcagccctgcctgggtccgggtggacgggcagtcccgcttggagacacaatctcccagcccagtgggcagcacccagggtgggaaggggtgcgggcagggaacggggcagccgtcgggagagggcgggcggagggaggggaggtgggatcgcagcctctctggggcaggaaggtgaggggcgccgtggggttcatggtgggacagggatgcagcgggtgccggggctggggcccggcatcccgaggagcagggctgggccgtcttactgagagccatctgatacacggtccgctttttctccatgctgggcaccggcgccggctgctgctcgtactctgtgggcaaagaacacggatgacgcccagggagcccccgggggcggggcggagcgggctcggcctgtgggcgtggccagcaggtgcgggccagtgggcgtggcgggcgcgagaggggcagtgaggggccggggtcagggaggggcgagtccgccggcggggtcgggagacgggggccctcccgccagtcctgtgcccactcaccactcttcttcttccagggggagactagcccgggggagaggcagtagaggagccaagagttaggacgtcaggggaaggtgaggggccccctgtctggaagcccgcctccctcggggccccggggtgggggcggtcagctgtccgaccagccccctgtcaggggaaatgggacccccaggtccactcggccttgtctggagggaggggctcgctttcctctgttattgggggttggggggagctggtggagggagagatgttgaatggggctggggggtgaggtgggacaaaaggaaggagacagagagacccgcagagagggtacatacagaccctgagagagaccccaacggagaaacagatacaagagcacagaggaaagtcgtctctcagacaccccttcccagagacacacacacacaggccagagtccgacccatggactggggacaggatgaggacaaggacccctggtcactaacaacactaacgaactcaagggatggtccagccctccttcccctctccccccggccccctggcctcagcagccccgcaggctcacccatctcctccagctctgaggtcatagatttggaacgcagggagatggttgggggcggcagccgcttggcctgctggggtgctgaaaaggtgatgaggggaggcatcagtatcatgggggagatgcccccaccaccctctaccaccacagggctcccagggctcagagaatagccattgccagcgtgcggagccctccctgcctcagtttctccccacaagggtcacggagaagcagtgctagggaagggaaggccttgggcagcagcaaccagccctggggctcccgcagggctgagcctggtggcagtggggtggctgcgagagtggccgcaggagcacctttcttgtgcactgcctcatccatgtccgggtgcctggtgaccatcaccaccttcaccatcagcgtgttgcccccttggcggatcatgttcaccacctgtcggtggccgaccttcaccacattctgcccgttcacctgtggcacagacacccccagatcacacagagtagacgaggggaggggtgcttgcagcttcagagaccccaaggaggatgcctcctgcgctgccctgtccatggccctctgggctatgttcctctccctccgacccttcataccaccgcctccctgggcaagccccctttcccaccctccctggccccagggttgggggagaggctcagcctaccctattcacttccccctccctccttgtccccagtatttatttatttatttacttttatttttaaaagacagggtctctctctgtcacccaggttggggtgcagtggcccaatcatggctcactgcaccctcgacttcctgggctcaagcaattctcccacctcagcctccagaatagctgggacctcaggcacacagcaccggctaattttttttttaagagacaggatcttgctatgttgcccaggctggtctcaaactcttgagttcaagcaatccacctgcttcagcctcccaaagcactgggatcacaggcgtgagccgctgtgcctggccatcccccggtattgtgtatgtgttggggacagctctgtgtcactcttttgagatgcctcagaggcctttagatggaatcgctggggaaagcagaggctggctggggggtgggcagggggctgggaatcctggtgccaaaggagaataaaactgggcagccagatcctggtgtgaatcatgagggggtctgggaacttgtcacagggtcccagggaagagagggggcctggactgacctcgatgaggaagtctcccattcgcagtccagctcgccatgccacgccaccctcgtccaccgactccaggtactgcagcgccgggaaggccggggtgggggtgaactcctcgatgggggtctgcgctgcagacagggaggagccggcggggtcggaggggagggggtggagaggccgagcaggggatggggctcagacccaagtcacggaggcctcaccgcagctgagggaccagcaccccggggtggggtggtgggcgggctggggtcccttcccctttccagcccccattttcagccctgcttctggggtcacagagcccttctcccatcccctccccggctggcactcacccttggccccccggagcacgaacccaaacccctcactgtccttcttctgcagcaagactgtcttctccttaatgatgtaatcgctggcagggaggcaggagaaatgggggggtggtggggggagtggagaagacatcatgagacacagaggctgtcccccacccggcaacccagacccaaacctctgctccagggccattaattgcatctcctaggatctctgtcacccactctgtgtgtgtatgctagccctgatgggcttccccctcagagccggcatgctctctctctcactccctctctcctcattcatccatccatgcatccatccacccatccattcagcaccaggcacggtggggaggatggggagaagagcttccagattaccagacagccaggcttgggtccctgctagtcacttcctgcctatgaccttgagcccacaactttaaccttttgtgcctcagttccctcatctataatggggggctatcacagatcctacctgatggggttgcagtgggaatccagtgggggtaatacacatttagtatttcgcacagtgcctggcacatagtaggtgctcaatatgatctgctcgatgtccttaggtcagagtgttaagtcaagaggactcatgtactttgatgatacccctcaaaattcctttatacatatgtcacctcccaggaaccccacacagggtaaaattgctaattctgcactgcccaatatggtggccactaggtgcacgtggctgtttttatgaaagctaatcaaaatcaaatggaaaaattcaattcctcagtcacagtggccatatttccaagtgtgcagaagctgcacatggctggtggccaccacattggacagtacagatatagaacatttccattgctgcaaagctccccgtggacagcactgtcttctgtattccctggtgcatctcaaatggagctactgcatgcagtcagcatattctattatagtaaaatgcaaagcacccatgaatatgggtggtagtttccagtaaagccatcaaatgccaccagcacatttaggtaaggctcacgtacccaggaaatgtcaatgaaactcagatacagttcatggatctcaaggctcactcaaacagccccaaactcctgacatgaccactgtacacctcaggaatatacatccattccattcccagaggatccgacaccccagtctacatcaggaatactcagacaccctggctgcaaccccactgccttcagaatacccaagaacacccaggagtcactggaacgcgtgctctgctgtgctgagcttccttcagcactgtctaaagcctgtcccagggcacacttgtagcacctcccaccctcacaatcccagtgtattccaataatacccagatcccagtaacatccatgtggccctaatacactccaatcatagccaagcatgctccccaattacctgcccccacaaattcagcaaaacagccgtcctcgaatactccagtatgtttcggcaacccccacacatcccagtatgttccaataataactccccctcactcggatctcagtgtattcccataacacgccctctgaacacatacatcccagcaaatgccaataatacttactgtgctccactgtatttaggtaccacccccacaagcacccctgtatgctcccaggacccccatggctccccttgtaaaaatccatacatttgcaccatggcgacagggttctggatgtgcacgtgtcctcccttcctgctgccaccctccttgtggcacctcagtgcacctaacaccacgcatgttcacatgtacatactccagcaacagtcctcgctcaaagttcgtaacagtccagtaaactcatccacaccatacccgccatgtcttcctcccctggatagagaggtgttggcagagaaggagggaaggggctgaaaggggtgaatgagggtaggaaaagggagaggggaagggaggaaaggggccgagaaggccagaacagcaagtggacggggaaactggacacagaaattggctcagaggtcagagctgcctgtttctaaccatgcattctgtaatgtccccattcccaccttcttactcctcctcctgtatctcttccaggtctccaaggccccccagcagccagcagcacccttcctcactggaggcaacctcactttctttcactcatgccacaaacccctcccttcctccatctttctccctcccctctggaatctctcttgccccctcatcagcctcataccccatacataagccttccccaaatgtcagccaatatagtcaataaaactcccatatcaatatgccaagaaggagcacttgccattggctgggcagtatctgaagcccttcacagatagatcattaaattgtcttctcataaccagcctctggggcagggataagtaccagttctactttatctatgtatttattcatattttttgagacagaatctcactctcttgcccaggctggagtgcagtggcacaattatagctcactgcagcctcaaactcctgagctcaaaggatcttccaacttcagcttcccaagtacctaggactacaggtgcttgccaccatggccaactaattaaaaaaatctttttttttggtagagatgggggtctcactatctttcccacgctggtcttgaactcctagacttaagcaggcctcccacctcagcctcccaaagtgttgggattacaggcatgagttgccacacccagccctagtttcactttataggtgaggaaacagaggcacagaaaggttaagtaacttgtccaaggtcacacagtgagtatcattcttcaacaatacccaagagaatactcgggtaactgcagtggtaataccctccactccacagcaccgaaataccttgagcacatatatccatctgctcggaatccaccctgagctcggccctgcagcacctggagtttatcccagggtgtggcagtaacaccatgacaatgaggaacacttatcgaattattactgaatgccagccatgattccaagcactttgcatttatatatttccatttatgtattcagttagtcctcacaacaacccagggaagggttgactgttattcttcccattttataaatggggaaaccgaggcacagagaaataacttgctcaagatgacaccagctagaaaaatgtcaaagccaagatttgaattcaccagatatatatatatatatacacacacacaccagtggtgatctgaggcagggaggggggtccaaccacatccagacccaccctgttcctgcttctgcttctcaaccaccccctatcctacacatgctccattcccctctctgctccatgactccctcacccaatccccagctaggacatacgtggtgttgccctcatcccaccacagtctccttgaacttcccaactgctctcttgctcccacagctccatgtacctctaaactccctctccccaactcctgtgtacccctcctctctgcacctcactccctactcctccatgccatgttgaggttccacatcgccctaacccacccccctcatccctgactcccacaagccctcctcacaccctatggagccatccccccatttcccgtgtcccctgacacaccctacccccctttccccctaaacatcctcctcagacctctgtgacctcctcacccttgtcctgcgacctctccctcatcctttggcctcacccttcccacaccctcctgcacctccgtaagtaatctcactggctcccctaaagtacctctggtccctttcatacttcctgggtaccctcttttgcatccgtggaaacctccacctatttctgccccctcgactcacttcaccacatgccctcccgcctgcatttactggcagctgcgtttcatttacattccctgtgtcctcttggtattctccccctactgcccaaatccccacccccaaatacccccccacattccctgaattccctccccaccccatttctctgctccgaaccctcggtgctccagccgccacccctcccccacttcagtgtccccactctcccctgttccattctcaaccctgcacctcctacccagacccctctagtccctcccccttgccccccatcttggctgcccctgcagcaccccattcaggctccctctggctgactacctgccctgcaggagcccacacaatgcttttccccaggccatccctaagcgaccctgagcggcctccagagctcagcagccagctcttgttcactggatcccacacacaggggcactgcagcggcctgcactcccctccccaccccaacgtccctctcacacacccagggtccgccagcccagagcctgctgctgtgcacgggcgcacccccaaccccgcactcagccccttcccacgtacccgtgtccatggcctgcccagaggccaccacagagggacgccagcccccctccccatgctgagaagtggcacacacaagcggatgcggctccccatgcagctcagccggggctcagcacacgtgccccacatgggcagagggcagagccagtgactcaagtactcctgacatgcacagacccccgggggcaagggggcaggggagaggagcacatggggacagagacacaggatggacccttgaagtaggggcctgtgggggaggggtaggccaggcccaggagggtgggtgttgggaagcacagccgcagtccctgggacagacccactccagcacacaccacacacacacacacacacacacacacacacacacacacacacagtcccagacagcctcgctgtcgctccaagtcatacagagacagacgctgtcacacagggacacacagatggacacagttggggggtgggctgggagcccaccatctctccatttctctctctcacacacacacgcacacacacgcacgcggctgcaggcagtcacacacacgcacatcgacacagccacactgacacacgcaccgtcgcacagtgacacgcagcggaaaaagaggaggggaggggaagccgggggcgggatgcgtgtgtgatggaggggggatgactgtgaatgggagagaggggtatgaatggggggacttgccaacaccgtgaagaggtgtggggatgtggggatcagagggacaggggcctgggatgtaggcggatgcgggtaagccacggtggctccccacagggagggctccggggaatgggggcgctaagggcggcagaaaggcgagtgggctccaaatcctggaggggggtcggtttagggggcctgctgggaggaaggtcttgggggaagagcagaggggggcctggaagggcctgtgagggggtggaggaaaagattcccagggctgacgagtgcgtattaggggggagggtcggggagaggattccagggaggaagatggagaggagaagggttgagaccaggggcccgaaagggatttcgggctgagagaaggttagggaagaggagcggaggggaaggggcgggttgggggaaggggaaaggccctggggctggggtttagcggcgggggagggtcgccaccgcgggccggggcctgccggccggcccgcaaagcaggaggcggcgcgctccgttacctgtagatgtaccagacgctgcgccgccggggccccagggctggccagctggaggacagcgcggggggcggctgcggcagggagctcccaccggggccgcccccgagacccccgccgccgaccgcagacaaagccatcgccgccgcggccccagccccggcccgggtcccggtgccggccgcccccgccgccgccgccgccgccgcgtccccgtacccgctcggccgaacccccgtgtccgggcccccaggccccgcctcatgctgacccgcgccgggaggggggagggggagggggcgcgcaccccctcccgcgggagggagggcagggccgggggctcacatgccggggggcgcgggggcgcggggcgcggggtcgggccgcggcggtagcgcgaggaccgcggacggcgccggcttcagcaccgcggacagctccggaggcgggcggcgggcgcgaggcttaaccccttggcgtcctgcgccgggcggcggagggggccgggcaggggggagggggccgggaggggaacgcgggggcccccttggcgggagaagggggaggggcgaggcttggaggggggaggagaaggggaggcacttccggtctgggcccccccttaatccccctcccccctccagagccctcccgcgcaggtgcagagctagagagcgcggggagagggaggcacaacatcacacaagatgcctcgcagccgcgtgcacggacgcgcggacggagccccgcttccccggcagggacaccgcgggtgagagaggccccaggcggggacacgcagcccaccaccacagaccaacacgcaacgcacctcgacacagtcggcaagaaaggccaggacattcagactgggccccaaggccatgagcaacacccctcccccaccagagaagcccaggcggaggggcgaacacaccaccacagctccccgagagagcgtggaccccgagccagcgcggggagggggcggcacacgccaggaggggagacacacggaaggaccgcccagctccggcagggaggctggggttgggccctggctgccgggcgcacggcacagcacaggccaggccagcgcagacagggtccgggaagagcggggaggcaggaggaggggaagctgagacgcaccacacacacagcagcacgtgggagccagcgagaggcacggaggagtaggggaggaagcccattgacaagacagagtagaaggaggaagctgagggtgacggggaccacccgcattcagctggtaggacaagtgacccccacagacggaggccaaggagagacccagagagacactggtagacaagaagcagaggccgacatagaagctcggggtgtgggggggtgtaccccaatactcacccggtgcccagagcaggagacgcgccaggcaaacacgcacaacggtcaagcgcctcagacactcggggcgcagggtggcaccccagccccaccctctctccccatgttgccatttctctgtcccccccatccccgacccatccccactggccagaacacagacacgtaggtttggacacatttaatggaaggatgctacgcacaaggggactcttccctggattggggggagcagtggaggagagtgtcatattttagacaccaaattatgaccctccctcccccacagccctgtccttctggaggcccaagccctggaatcctcccctcctctgcccttccctcccccaacatcccaggtcctgaatctcagatcaatcagacagacgcacatgcatgcacacacgttaatgtgcgagtacacacgcacagtgacatgcacagagagggacggatgtgtgcagagacccacctgtccatgtgtgtgagcagactcactgacatgccctgtggtgcttgcccacggattcagagaagcacagatgtgcagagccagccccacagtcatcatagccacaaaggcaccagtatatacagagcagggcagaccctccagccccgggcataggtacaggtacatccaggccacacatgcacacagatgcgtgtcatgcacacctacagagacacacgttcacacaccaagaaacctcagctctggtcgtgcacacacgttcacacgccccccaggcaccccgtccttcccctcctgaccccatcccctccctgcccctcgcctctcacctccctgggccaatcccatccattaagcttccgaagcaagtcagccagcagccagggaggggaaaggtgtcagtgcacccatctcctcaccccaatcccacccagccctgactgcaccctccccacaccggtgcatgggacacacacattcccactgcacatgactgcacagagatggggcacatgaaggagacaagggcctccagccagccagacataagagcgccccggcccccccaggcatccccaccctgccctgaccaccccgttgtctctggctaccccagagctgggcagtcttagtggctgccgaagatggtttggggttgggctgtactgtctgaagctaattctggcttatcccacccctggatcaaacttgagaaggaacagattagaaagggggcttagaggtgatggaaatatttaaaggtgtacattgtgaagggaacttggggtgaggggggttgcccgagggtgtaaggacatttaccttggggcatcaaagctgtcgtaggagcccacggtataatgccggaagagtctctttgccttgtcactgcggctttctgcagggtgacaacagacaaccttggactcttgttttggaaaccacaatcccagccctagagctcctggcccaagtcttcccatctacctcccagtaccccacccccattaggaagggaaaggagtggacgtgggaatcctagggtccattgaacactgctgggggttccgcattaccttgcttgctctcctgagagcgattcgccacttcttccaggcagtcagaggggaaccagccaacacgacctttgacctggccttcccagaagcctccttccccgatgctaagtactggatggggaacggggacatagagacatttctgtgtttctgtgctgcccctcaactgccaacacactcaacttagagcattcccacagttaccagctcctggcccaaggccatccttaataaacatctgaggaaggggcgaggagcttgggggagacccatatcatatcactcttgcattctagtttctggatccaataaggatgacaggcattggggaagacgactgttccataacatggtcttcctaggttagaggcaggtccacaattggtccttgtctcccctggtaactggtcacagctcagttgtgtaattccccttcaccctcctaggctctgtggacttagatcacggatggggcgacaagttctacctcaccctcccatcactgtccctgccacctcccaaagtctccttgccacttaatctttagtcctttgtccccagacccctgtctctgtctctctcggcctctcctggctctagaagggaaaagagattagcatcacctctttccttctctccctctcccctaatggaagcggcttccccctgcccaccctcccaggccccaccgcttccccatttagcaaacatcacagactgcctgttacatgcctgctgctgaaaaacagagatatatgacaagaacagctaatgcgtatccaactctcacctgggccagaaccctaagaggggccactttcattatcccccttttactgataggaacactgaggcttggagagccaagatcatttgctgaaggttacaaggctagtaactgacagatctggatttgaacacagctcagtctgcttccagagggcatactttcagtcactcatgtgcgctacctctccatgcaacggcttcagtgcatgacaagggcaccagtggcaaacacatggtcttccatttctccggcatttttcatgactctgcccccattcagcccttcacatagtttccttcctcgttcaacccttgtgcctacccaggtaggtaacaactgtttttccattttatagacaaagaagctgaagcgaatgtggagaaaacccttgcctggagatggctccagctatgctaggggttgagttggggccatcagatgtattcccctccacaaactgcctcccttgagagcatctggggagaccaaatgaggggaagctgaaagtcatggaagagagcaggagatgggttgtcaaggggactgggttcttggctggtactgccatgcctggcttggtggtcttgtaatcaatcatttgttcactgtaaaaatatttagttagtgccagtcatgagtcaggtaccagggtagacactgttgaatataatcaatgttgttccttcctttgaggagcttccagagcagtggccaatagaggcataactatacaagtgactgtatgattggaagttggggtcagagctcaagggaaaataagagggtgtttggagagaagccagatgggagtatataacttataatggcaaaggggtccagggaggtgtccctgaggtgtgacacataggttgagacctgaaggatcctaggagctggggaggcaaagagagcatggaagagttccaggcagaaggaccagcatgtttgaagagtttggtgtacaagaaagcttgggacattggaggaatggaggggttggtatatcggaggactggagaattggagggctcagggcattgggggattggaaggcttggggcattggaggaatggaggggttggtagcactggggaactggaaggcttgggcactgggaggattggatggcttgggccattgggggaatggagggcttggggctttgggagattggagggattggggcattagaggattagagggtttggggcattggaggattggagggctcggggcattggaggattggagggctcggggcattggaggattggagggctcggggcattggaggattggagggctcggggcattggaggattggagggctcggggcattggaggattggagggatcggggcattggagggttggaaggctcggggcattggaggattggagggctcggggcattggagggttggaaggctcagggcattggaggattggagggatcggggcattgggggattggagggctcggggcattggagggttggaaggctcgggttggaaggctcgggcactggaagattggagggcttggggcattgggagattggaggactcggggcattggaggattagagggtttggggcattggagaattggagggctcggggcattgggagagtggaggactcggggcattggaggattggagggctcggggcattggaggattgaagggctcggggcattggaggattggagggctcggggcataggaggattggagagctcagggcattgggagattggaggacttggggcattggagaattggagggcttggggcattggaggactggagagtaggatgaggtccctggaaccttgtgggtgaaaggaagagtcgcatgagatgaggttgacaaggtgggcagagaggcagcttggaggccaggtgaagactctgggctgtgattctgagagtagcaggagtcagctccctcatcaggctgtgtgaagctcagtgacatcgtggatgtgggtgtgctttgaggcaattaagtccctcttaatggaagacgaggatataaaaacagaaggcagtgtgttctctccctgcgtagaagcattgagcttgtagctcagcaagatactgcccatggtcctctgcctgcccggaaggtcctttacctctggcctcagctcacctttcttttctcccatctcccccaaccccacgtgcctacatcccaggcagctggccctgaaggagctgcacctggcccccacagtagctcctgaatttgatcattcattcactcaacatatgtgcattaaagcctcctgtgtgctgggtcattaaactgagccctagagacccagagaccagtgacttatgacctcacctacaggaactcaggctatgggaagagagactaggaaacacatgcagttacacagcccacctgatgttctgacccccgaatacccttcaaggcctcactcaagttgaccttctatggtaggatcctccctgcttattcaggggcccaggtctctctcctctaagtgcctgaagtaggggccacttaggaaaatgatggctttttttttttttttttttgagatggagtttcactcttgtcagccaggtgtgatcttggctcactgcaacctccgcctcccgggttcaagcaattttcctgcctcggcctctcaagtagctgggattacaagtgcgtgccaccacacctggctaattttttttttttttttgtatttttagtagagatggggattcaccatgttggccaggctggtctcaaactcctgatctcaggtgatccaccctcctcggcctccgaaagtgctgggattacaggtgtgagccaccttgtccggccaaatgatggctcttatatggcacttgttatgtaggaaacattggtctaagtactttacatgatctgactcctccaatcctcatcaaagtcccattttacagatgaagaaactgaggcccagagaaatcacttggctgaggtcaccctgctaggaagtggtggggtctggatttgaacccaggctgccaggctctcaacctctataccgctcagctcctgggcagcctagagtctggcaaagaattgttccaatgcctcgtattaacggccacacctgcggcacgtggtggtctctaaagcatccttctatccaagaacacgtcagcagccctgcaaagcctataagcaggggagactggctccactttccagatgaaggtggaaaaaccaaagggaggtgaaccctgataacagcaccaccattttgggaaccctcgccacggccaaacatcttatatctgccagctcgtcggggccctagaagtaggtccctgcctgtctctcagttgaggacccctggacagatgcaggaggcaaagttaaggctgctcggcctcacgctctgcaccaggtggcaggaaggactgtgggcttggactgaggaccttgggcaagtggcttcacctgtgtgaggttctgttccttcaaccatgcaatggggcccatgacctccctccccagaaagggccatcaggagtctaatgagacgatttggtgagaagttccagccatgccctgcacacggcatcagtgtcccgcagtgggacacggctcacttcactgcctcctgacagggtcatctgagctacactctatggtcctccaagcctcaaggggtgtcctggggctctctgaggtctccagagtgcatgagatactccaggtgcccgagaatggtctgctctctgctccacattttccctgatcgcccccacagcccagcccagcccaggccctgcttccaccctgggtacctttgatcttctcgcccttgctcagggagatctccccctcggcttgggcctggtaggacttcacagccatgaaggagcgtccgggtaccgctgagtagagcttcctccgcctcccgcggctgcccagggagcccccggggccccctgagccccccgtgcccccggctggcccttcccggggtgtcccgctggagctgcgtacacagagggcatgagaggaggggagggtggagggaggggacacctctgggaggacaggggtccttgggtgggggaagaggacggtgcatcaggggggagggggggtttcccagcactggcgtcctccaaggaagagggcatttgggggctccctctgcctgcccgcagctgccccaaccagccccctctcctgcctcctggcttccggctctgccccctcccacggtcctgcgcgcaccgcctgattcagcttcctgaggctgagctgggactgtgtcatccctccgctcacgagccttccgcgactcccagcttcctcctgggtcaggtccaactcctctgcccgccgttgccagcctctcccccacttcctcgggacacgcctggctggccttcgcctccttctcaccctcctctagccaggtgggcttcctgaccccggaatgtcccccgccccttcctcatcctccctccagagtgacctctctgtccccctcaagtccctgccaccccccccatcctcttcctgttcagcttccctccacctcaccctgtcattctgtctgtccccaggggctggggcccatgtttctttggggtaccctctgcctggggcccctgtcctggagcagacatccagctaacatgtggtgcaccgggggtggagtcgggacagtagctcccaaggccttgctttaccccaaggtgacactagggacttggatgagggcctacagaggaaggcagctgggctggcctcgggggaagccgccgatctggagaggggatttgacggggctggggactgtggagccagggctgcctcccctacctgggccggcctcggggctgcctcttggcgtcctcagggtgcctccctcgggatggagagcgggccctggcaccccgggggctgctggcacttcggagggtcccgctgctgagcttggtggtgggggccgagggctgcgactggccctgggaccctgaggtagggccaggggccccagaggacgcggcccccggggcggagaacaccatccagtcgggcagcgccatgctggtgtcactgttggcccgcagcagcgccgggggcaccgtcagccctgtgcctgggggcccccgtcgccgggccgcgtacttgggggactcctggaagggcactgagagggcacagtggcggcggggggcagatgttaggggagaaaaggcaagcagggggccatgcgggggcaagagatggtgggagagaggcatgagggagaaagacagagatgagaaagggaggggggcctggaattgctcccccaccaccatccagacatttttggtcctctagggttttctccatcctatcctggcccccaagtcaggtcccccaactcccccatcccaccatgaaacctcaaccgccccaggttctctgtgcagtccgagctccctgtcactcacccacatcctgttctcggtggtttcggatcagctcccccagctcaaaattcccagcaatcactgccacctggagggagggggtagaggcaggtcggccaggggggcccaggcagcagagagagggcagggaacgtggcgaggtccctggcccgacccaaaccttccactccgacaatgccgccctctgtcttcttccagctccccctccacggcctgtctccttgctttcctcattgtccccttccttatccactgggtgtcactgtcaccctttccttagccctggaaactccagcacatcccctgcagccccagacctggaagggggtctgtccgttgttgttcttcacatccttgtcggcacctcgatacaggaggatcctggcacaggtctcctgcgggtaatggccagtggcacaggacaaagagagagagaaaaaattaagatcaccatgagtggatgcaggttctgtgctaagagcctcaggaataaatactccaccctaaacccgcaccactgaggacagcagccacctgccaggtacggaccaggagcactttagtttaaacgtggccggcccaaacggagatgcaccatgcatgcgaactacacactggatttcaaggatatgccatatgaaaacaagaaagaatttaaatgtctatagccaggcgtggtggctcaagcctgtaatcctaagactgtgggaggccaaggcaggagttccagaccagcctgggtgacatagtgagacgccccccgtctctacaaaaaaataaacagaaattagccaggcaggtggtgggtgcctggagtcccgaatacttgggaggctgaggtgggaggatcgcttgagctcaggagttggaggctgcagtgagctgagatcaagcctgagtgacagagcagggacctgtctcccccccagaaaaaaaaaatgtcaggtgtggtgacacacacctgtaatcccagcactttggaaggctgaggtgagtggatcacttgaggccaggtatttgagcccagcctggccaacatggtgaaaccccgtctctatcagaaaatacaaaaattagccaggcgtggtggtgggcgtgtgtaatcccagctactcaggaggctgaggtgggagaatcacttgaacccaggaggtggaggttgcagtgagccgagatcctgccactgcactccagcctgggtgacagagtgagactctgtctcaaaaaaaaataataatttctgtattgattctatgttgaaatgataatgttttagatacactgttataagtaaaatatgttgttaaaataaatgtcacctaattattttccccttctctttaacatggccactaggatatttgagggcatttagggtatgtgctcatgctatgttccactggatgttggggccggataatcctttggtgattcattggtttgtggagggtgttctgagccctgtgggatgttgagtagcatccccggtctctaccactagatgccagtagcactcccctccccagtcatgacaaccaaaaatgtctctagacattgccaagtgtcccctgggagacagaagctcccaggttgagaaccacaggtctagaccttacggaggcttaccatgttacgtgccaggcgcttggcactttagaggcagaagctcattgaattgcccaacaattccaggacatggaaattgtctctattttacagaggaggaaactaaggctttcaaaagagcccaaggtgggccaggggtggtggctcactcctgtaatcccagcactttgggaagccgaggagggaggatcgcttgagcccaggagtttgagaccagcctgggcaacatggcgaaaccccgtctgtacagaaaattttaaaaaattagcctggcttggtggcacacgcctgtagtcccaactacttgtggggctgaggtgagaggatcacttgagcccaagaggtcgaggctgcaaagatccttgttcatgccactgcactccagtctgggtgacaaagtgagaccctgtctcaaaaaaaagggggggttgggggggctcaaggtcacacagctggtgattatcagccttggattcgaacccagatctctctgactccaaagtcttctatcttaatcacactttctgccaggcccagaaggaaggggacacacattgtggaggaaagggtgggggcaggactgggccagtggggacagggatgccttctacattcagatcaatttctcaccggtgtcaatcacatggcacccatcatcactttttgggctaagcacaaagtccatgccacggcctaggagggttagggttagctgagctaacctgagctgcctgccctgccactccccaccctgaccctcaccaacttcatcttctaccacctgcccttgctcccaggctgcagccacactggccacctccttcctctgacagcacactaatgccccaggacctttgcacggctgctccctctgcttggaatcctttcccgctagatctcagcatagcttgcttcctcacttcgttcaggcttttgcacaaatgccgcctcttcagagaggtcttctctggccatcctgtctaaaaaaaaaacccttgtcctcttccttgctttatttttatttatttatttatttttaaaatttttttgagatggagtttcgctcttgtcacccaggctggagtgcagtgacacgatctcggctcactgcaacctctgcctcccaggttcaagcgattctcctgcctcagcctcccaagtagctgagattacaggcacccaccaccatgtctggctaatttttgtatttttagtagagacagggtttccccatgttgtccaggctggtctcgaactcccaacctcaggtgatccgcctgccttggcttcccaaagtgctgggataacaggcatgagccaccgtgctcaaccctttgctttattttttagtaccacactgatgtatgtgccaggcactctaagccaatgttaactcattttcttcgtaaccccgtctcactgaaattccatttcctgttatttgtctcagtagtgtctcttctcctctacaccataagttgtacaggggcatgattttgcctgtggcacccaccacctggattaatgctggacccacagggactattcggtagaaggagtgtcctctcccttttatcttggcctggccaaacccaacttggcctccagctcaactctaccccagcgccctctgatgctaatttaaccaccatttcccaagcacctccttgatcttaccccttccacatgacaaatccaccaaggggtttgtatgggcctatgttacaggacaggttcagagagggcagatgctacgcccagggccacacaaccagttagtggagcagttaggattccaacaacctggccttcttcttcctttttttttttttttgagacagagtctcgctctgttgccaggctggagtgcagtggcgtgatctcggctcactgcagcctccaccttttgggctcaagcaatcctcctgtgcacctggccttctgatcctatggttcacctatctcctatgaatggacgactctgactgccaaagtcacacatcgggcagcagagttagcccagtgtgtgttctgggtgtgtttgggagtgtgtgtgtgcatgtgagtctgtgtatgcccgtgctgctggccaactagactgttaactcctgccatgtgtacttttgcgtgtttttcttttcttttcttttcttttcttttcttttcttttcttttcttttcttttcttttcttttcttttcttttcttttcttttcttttgagatggagtctcactctgttacccaggctggagtgcaatggcgcgatctcagctcactacaacctctgcttcctgagttcaggcaattctctgcctcagcctcccaagtagctgggattacaggtgcccgccaccatgcctggctaatttttgtctttttagtagagacagggtttcaccatcttggccagacttgtcttgaactcctgacctcgtgatccgcctgcttcagcctcccaaagtgctgggattacaggtgtgaggcaccgcgcctggctttttgcatgttttcacagccccaacacccacactgggggcacagggccagagcacagcccctaaggtcacctgctcctcatcctactcttacaaagctgagaaggtgtgcaagtcagagttgatggctccctcccctgggcaccaagagaaactcgcatttaacggcatcctagcacttatctcatgtcgtagccatgatttgcttacacgtctgcctcctcaccagactgtgaactcccaccccccccaaccccgccctcgccctccccaggccagatgctgtgtctgattcatctcacatccccaaggcctggtgctgtgcacatagtaggtgctcaaggaacgtgcatggaaaggatgaggatggaggatgtggggttgagtcagtcaaaattcatttgttcgagtcattcattcattggttgagtcattcagtctgttgaaacaagcaaacacctgttgaatgctctgagccaggcactgtgcacagtcttggtggaaatccaagagggctgaccccatcattcattcactcattttcattcattcattcactcactcaacaaagatggaactaggcctgctgtttgctggggtcctggaacagagcaagtaatcagactcaacccccacccttgaggtgctcacagcctagacacggatctgacattcaccaccaaatgctagacgggcatatcaggaggccaaggcggcagaggctgaggaaaaactgtcagactcagccctggctcttggaaagcttaaagcctgggaggaagacaaggggggaaatggaggaatcaagttcgtatgtgttatgcatcggtttgttaagcccatggcaaaggcaagcaaacctattaacccacttgatccttttgcatggtagatatttatttatttatttttttgagacggagtctcgctctatcacccaggctggagtgcagtggcatgatcttggctcactgcaaactccgcctcccgggttcacgccattctcctgtctcagcctcccgagtagctgggactacaggcgcccgccaccacgcctggctaacttttttttgcatttttagtagagacgggatttcagcgtgttagccaggatggtctcaatctcctgacctagtgatccgcccgcctcggcctcccaaagtgctggaattacaggcgtgagccactgcgcccggcctgcatggtagatattaattattgacccatttcacagctgagaaaggagatcaaggaggggaaaatgacttgtgcaactgtcccactaagaaaactctgcctgctgtctaattctaatttttttttttaaggcagggtctcactctgtcacccaggctggagtgcagtggcatgatcatagctcactgcagcctccacctcccaggctcaagcaatccttctgcctcagctgcccgagcagctgggacttcaggtgcatgccactgtgcccagctaatttttgtattttttcatagagaccaggttttcccacgttgcccaggctggtctcgaactcctgggctcaagccatcctcctgccttagcctcccaaagtgttgggattacaggcatgagccaccgtgcctggtctaattctctataccaaaatttctctgtttatctgaacggtacagtttctgtctctcgactggaccctgactgacactggtgatggtaacaatgacaattattattctgatggctgccttccagggatgagcacttagtatacacgatggctcaccctcgtcaataagagctggcgttattcccatttcaggaagaaggatggagcctcaaagagggggagggacttgtttgctccccacccccatctgcctgtggggccagggcttcttccccatcagctgcacgagggcctgggagtcagaggattggttgtgaggcctgtgtcgcagagcaggagacaggagcacgtggggagagaagtgccggcaccatgttggttcggtttgacaaacactgagtcttccctgggctccaggcatactgctggctgccacaaggcggcacgtggccacccgccaaatccccagcactgcaagttctgccgaggcagagggggctgagggctgttttggaagacttcctggaggaagggggctgacagaccagctctgtcatgctagcgcctgtctctctaagtacccccaccagctgcccttcaagggcaggaagcatcaagaaacaggtggggagattgaggctttccatggggctgacctgcccaggatcatctgcagctcaggtggctaaagtaccagaggtcatgacattgaaagacccggctcttgccaaccagctgccacgagcccccctgcctgctccgtacctctcctctcctaggaactccagaagtgggggtgttcttcccatctcccttcagcactcccttcctgctcagggacccaggttgtcaggacccccaaggtcctgaattgctaaaactcccatcccactgtcattcccttcaggggccacgggggctgcacgttggcctttcccctgtgccctgccgtgccgccacgtggcacctgcacacaccactggctgaatgcagacacaggggaactgaggacccacagccccctttcctctggctttctgcacaggctgtgcccccaccctggagcacccctttctcctcttttctactcctgctcatcttaacactgggggcacctcctccaggaagccaccttcacccccagccactccatcccaagcccagtcccagatgtgggctcccgcagggatctggattccctgtgactttgctctgagcactctggactgtagcagcaaactatgttgtctgccctctgctaggccatgagctcaacactttgtccccagcacccagctccaggcctgatacagaggagctcagtaaatatctgttggatggatggatggatggatggatggatggatggaggaatgaatggaggaatgactggatgaaagggtggaaatagtgaagaagtggagggtgcagagatgcagtcaagaggagtgtctgagcttggccctgggggaggcggctatcggggatgtgaggggcctggggtggccgctgctaggcagaccttgttgtagagggcgcagatgtgcagagccgtgttccccgaggcgttctgggctccaggctcagccccgtagaaaagcagatgctccaggtgctgagagtgaccccgctggcaggcctgggcaggacagggagcgaggggcatggatcagacccaggctgttctccctctgggccaagagtctgtctatgacctgtgcactggccttctcatcctatcgttcaccgcatccacctccccatcaccttttagccccgcttcctgctctgggacccaggctgtcagcctcaaaacccaaatgttcagtcattccaaggcccaggcgtctggtctgcctccttaagggggtcaagaggacagcccatccctctcaggggtcaaggcatcaggttccccagcctatgcccccttagggtctttctgccttcacccccaccatttcctctttggggaccatgttattctcacccccatgctctgtgaggaccctggcatctggttcccagccccagccccttggatgcctcagggactgggtcccccaccccagcccttcatggcctgaatcaggagcacctggtggatttcctgccagccgttctcatcagctatgcccagctgggccctgttgaacaggagcagctcgcagcatcgggggtcaccacccaccatggccgtgtggaacagaggggtcagcccccgacggtccttgtagttgggggaacccccaaggtccaggagcgcctaggaacggagagagaacccagtagaaaaacacagatgacagtcacacattaaccagctcattctgaagggccagggggactggaccgtcctgggtgacctacagtggccaatgacagtctcagttctgccgtgatgcccttgtgcaaccttgagcctggccctttccctccctgggccactctgattccgtgtgaacaatgtgggacttgggtagatgcctccagaggacacttgcactctgacatcccacccagccttccccctgggggcgatcttggatgagccattgaaagacattaggggccacagtacccacccattccacttcctacaggtgggttgttggggacaagtgagaggacagagtctggatgctggagggtctctgaccaagtgggaggtgttattaggtccaggatctcaaagaaggggcacagcaggaagccaggggacaggtaagcttgggtaagggcaaggatcgggccggcctcactggggctggaggccacttcctgcccccacttgaaggacagctctgggtgtggaaggctggcaataatgaacattaataggagaaagtcttggcagcaacctcgtgtgaggacagcctgtagcagtgccacccaacagaacgtttcccccatcatggggatggtctgcaactgcaccaccctatatggcaggcacgtgtgggcccctgagcacttgaacgtggctagtgagcctgaggaactgaaattttaattttacttcattctatttaatttaaatttaaacagccccaggtggccagtggctactggcttggatagcgcaggtctggaggctgggaggggcgtgtgtgagcaggatgtgggtttgggggtgagtgtgcatgggagatacatgaagaggatctgttaactccaggggtatactgcagatctttgtggctggcatctgactgcattaggggctcttcaggaaagcatctgagggagagaagggaggggccgtttagctggagcagctgtgcgtcggggtgcttctcaatggctgtctttgggggcagcccatcctgaccctcatgtgaagagcaatcaggtgtcctggcgggggcagggggagaagagtattttaaaattagactgtgcagctgccgctgtgtatgtattttgtgggtgtatgggtttgtctatttgggaaagtgcatttgaggctgtgtacgtggggaaggggctgtatttgcatgtgagagaggagggaggggagctggtgcagtgctggtttggaagggtagctggggggctgttttcagggtgtgtgtggaggggctctatctgggggcatagcagggagctcacttcgtattttaaggaatgagaagggtttacaccttggggagacagaggcagatttggtattaagctgggccacaggggatggagacgttctgggtgtttaggggaggaggccgtgcccgggtctgtgtgatgtcagctatagcccaggtgggtgcatctggggggcctgacaagggtgacaataggggctgtgtctcagtctatggaaaggggctttgaactggggacatgagagggcctatttttaactgaaaccaaagaactgaggtttgagaaagaacaaagggaaaaggagagagggccccatggcggggatggggggtccccgaagcctcaccgtgagtgccaggcagtgtcgggcgcatgcggccttatgcagtgcggtcatgccatcccgggcccggaagtcaatgtgggccccgcccaggcacagggttcgaatcacctctacagagccttcggtctgggccgccagtgtcaagggggtctctgaagggcgggaaaagctggtcacatgaagccccttctcctcccctccatcccttcccattttccaggctctgcagctctccaccccacagcctctggccccgtggcctcccccttggacagcaatgtgtttgggagacaccagtcaggaatggatgtgaatgcagatggcacccctgctccccagctctgtcctggccctgaggtcctcctgatgcgcacccctccctacctcccgaatccgagtcatggtaattggggtccagccccttgtccagcagccgcgccaccttgtcagatgtcccgagctgcacatactccaggaacttcttcaaccccgtctgagccatgggcaaagagagagaagacaggacagtcaggagcaaggcagagaagcagggtcctcaagcagcgacgtccagtgaaaatatacgtggagtcacatacgccattgaaaagcttctagcagcctcctttacagagaaaatacccagccctttgggaggccgaggcgggaggatcacttgggcccaggggttcgagaccagcctgagcaacaaagtgagacccttatctctacaaaaaatgcaaaaaactagccaggttgtggtggcacacgcctgtagtcccagctactcgggaggctgagctggaaggatcctttgaaccctgaaaggttgaggctgcagtgagccatgattgcaccactgcagcccgggtgacagagcaagaccccgtctcaaaaaaaaaaaaaaaaaaaatcagggtggttgggggtgaagtgttagttgtgttgaaattcgtgttaatgatatatgttatttaactgatatagctacaatgttactgtttcaacaggtaattgagatgaaaattattaatgaggttatttaacttttttttggtactaagtctttgaaacccagtgtgtatttcacactcacagcgagtcttagttgggaccaaacacactgcaagcactcaggagccacacttggccagtggttcccaaagtggaccgtgaaagtctggagggatggaacatttaggggaggaaagagttcaatgcatgctgtggtggggagagggtagacaaggagggactgggagtttttccttctcaaggatcaagagttcttcatttctgaccaaagcagttcccgatttcctcccagctctcaccatcgagacacaggacagacaggggctgaggactggcgggcaaggtaccaggaggacagatatggctggaaaggggggtgtaatggttggattttgcagagattcaggctatgaggttgggagaaatgtagcctgtctttgaaatagactctaggcagaaggaccttcagtgtcagggtcctaggccaaggtggggaagtaaagaggccttggatggatatggggggaggcaggggaagagaagggagactcaaaggaggccaggtgggaatgatgtgggcccaggcagagggatgaagggcaaaagaggaaagtaagaaggggttgtgatggggataatggggggtatttgtggttgtctcaaatgtggtacagcatcccaagttaagcgggggcagtggccagagggatcgctggcttggggaatgtggaggtctattgggaagaggtggggagagaaagtggttgggtagggggctccagtggtagggggctataggggatagatgccagcagggttttctcaccttcgtgtgcaacttggccagctgcttctcatccaggttggtctgtttgtaaactcgggtcttgtatcggaactgaggtcaagggtagggtagtgagagagacacagagacttggaatcaggggcctggggagaaggcttggggtaggggaaggtctgatccccttctaattccccggggtagctcagggtgggagtgaaaacagccctggaaccttggtctaggcggtagatgggtggcagtggcttttccgacagtgctgggtattatggtatatgtgcactgcaacccctgccttgaaggaggaggagtctggaccccacagggaatgttctagagtgcctactgtaattgggaatcctcccccaatttgatgggtgaggagaagcttggggcaggaaagtgacttggccaaggccacttagctggtcagaagcagaacagatggtaatttgaactcaggactctctgacttccctgtgatgcttagaaggtctggactcgcacactgggtgccccctcgttaaggtttcgagtgtgttaaaaagtgggtggggggcagatgtgttttagggcatgccttctcttatcagtgaaggagttggggaagcttcacctccaggtaggggacccccttctcaaaggactgggggtactcccgcagcagcctctcctcctccaggaagttggcatcgcggccggaggtggccggttggaacaggccatagttgagcacatcctgcaggctctcgctcagggcacagagcacctgctgcttggccgtccagatggtggcatcggggttgaagcgaaggcatttctggttggggaagagataggggctagggtgggccaggggccagaggagagcctgaggtgggttgggaagtgagccaggagctgagtgtgggggtgattcctgggaggatacccagcaccagtggactccccatgtcggttggggcactgtccctctcctgccgctggccagtgggcaggtactcactgtctggtgcaggtccgggatgccaatcctgaagaccatcatgctgaagtgggcgtcgtctgggacggacattgagcggccctggaggcctctaacagaggccaggctaccaggtgccccactgccctggccccgggtcccccgggggcctcgacctggcccgtctggggagctgtcggactctgagcccccctcgggacactcgctggcactgtggcgttcctcgtcctcgcttgtcgcggggctgtgggtcattgtggggccacggggcgacgggggacggcagcatcacaggcggctgcaggggccaagggcggccatcagactaggagcccgggacccctcagaggccgcaggcgctattcggtggtcaagcggtcaagggcagcctacccccactgcccaagataggcaggaaggaggctggacacaccctcggcctgcacggcctcccctgccgcctcctcccacgctggcacgcacacacccctgtccctgacatgcttctggcatgtgtctccttccctgcccttggccccgcttgcagcccgccccctgcgccccactttgctggtgacccagcgtggccgtgtcccagaaaccgcagaatcaccgcgggagctactggcccactttgccaggccacagaaaatgcagctaaaattagctaaggacagacaggtggacaaactgacaggcatcctgccctcctggccccagcctggcccctcatcccagggccggggggtggggttggggagaagctgaggctgacactgagatgtagtaagggggagagggaggtgtggtgagcctggagcgggtggagctggtgacttcactcaagtgtggctgacaacgcgtggcatgccgaatagtgctggggaatctgccgtcccaggggagcaaggggcactgagatgggggtgtcatgggcagagcatttggcctagggtgtccccaagggaaccacaagaggtggcttttggagactggggcatcttgagagggtgtgcgggtaggtggggaggtcggcctggggagtgctgtccaggtgacagtggtgtggtggcccgggtagatgtgggtggctgcagatgacctgtagctcttttctaggactgcagggtgggtgggctggcttgctgggtactaggggctccactctgaggactgggggtgttaggagggaggctaagaagtgagaggagggtctggggaactgagtgggggatcatctctagatccttgctgttctcccttgaggtggccttatgagggtggagccccttccaaatggggtccgcctcccttctgttctcccccaactcccaccccagcaccggaaaccagaatgtctggtctggtccctccccccaacaccaggcccggttcctgcaccgttgccatggagatgggaagcagtggagggtactgctgactttgggggagtggggatgggctggggggttgggaaagggaagactaaatgtgtgtggtgggaggagagttccaggaggtgtgggcgagcgagcctctaacccagggccggcggacccctcccccacgcgcggcagcgctgcgaagccccctccccctccaggtacccagccacgccgccccacctcgtccctgcggagaccccggctgcctcctccctgccccgccgcacagcccacctcgcgatctggggcccgcagacactccccctcggctgaccctggctgacccccagcctcaaccccgctcggagggggtggccggtgggatgaaagaaaagctggctagggccccccgcgcgtacggctgccccagcccccccgggccggctccggcccctccccctcagggctcgcgggagggagcgggcacgctccgccggggcggcatgaatcaaacgctccgcggctaagaatagctggcacgcagctggtaccgagacgggctgaggaatcggcgaggggggtggtggaggacgcgagagagggggtgccctgggaggctgtggggggacagggggcggctggcgtggccgagagcggggccggggagaatgaatggaggcggagggaggcggggaggggcggggagagagagccggagccgaggctgggaaactggtgggggagaacccggccggggagaggggcggggggcaccggggagcaggagtcgggggcgggagccgagggggcgcgccggccggcggtgtagggactggagacctggtggggacgcagggagcttggacaggggtggaaagggactggaggagcctggaaggagaagcgggagctggaggggtcgaaaggggcggaggaggcccgggcctagaccctcgctggaggggagtggggaccagggtgacctggcggaggggcccaggtacgccagggagggcgaggcgggggagtggccgggctgggcggggaggcgggtaccaggaccgagcccttggccccggagagccgggaggcgggttcgggataggggctctgctggccgggggtggggggcgcgccctcccatcaaggatgcgatctgggacggggcaccggggacccgggcgtaacccaatttggtgtcgcccagggcaacgctccccacctcacccgtacccccagccgcacacccaggccaggagcccggcgccgggccaaggacatccggggcgccctcgccccctcccgcggccccggccccgcagctgccccaaacccccaggttctcgacccccttacctgcctggcggggctgctgagtcccggtcggcggcgcccgcggcccctcccccctccccccaccccccacccccccggagacggggaccctcaggccatgccccaccgccccggagggcgagcgggcccggggagggggcgggcggggaccgggggggagggcgggagggccgaggacctcaccccccccgcgggccgggcctggccatccgcagagcgcccccccttccgccgcggccgccgcgcccctcctcgcccgcccccggctcggtccggccggctccgggcgccgcgtctccgcctgctcttcctcctcctcttcctcgggccgccgccgccgccgcccgctccgcgcctcctctgccacccttctcgctctctcgctctcgctgtctctccctcaccctgtctctctccctccctctctccctccctcccctccctccgccctctcccctccctccgggagccggcggaggagacatcgcccctccccgcgcccccaaacctcgcccatcccccaccaccgccggctccgccccctacccttgccctcccccaccactcctccccacctccgagtccccaaatcctgactccgcccctgcttgctcccataccccgaggaaggggtcctgcccccataaggtgcccccccacacacacctcaggaccaccccctcccagagagctccccgccgccctacacagagtggggcacaataaatatttgttgccagactctacacccccaaatttaagtgtgaaggctatagattcccaccctgtccccccaaacacacacacaccctttccatttaagcactgggtcagggcacacgtggacatacctgggccaggccacatttccccaaggcacaggtgcatagtcaccagctgtaacggcacctgcagagtccccacatacacacactctccagcgcatgcatgcccagacacaatgcacctggggtacacagctacaaacacacccagctacatgcagttgtcacacccctgtgcccgggcacacacgcagcacatgcacacatttgcccaccacacacgcacgtgcgcgcgcacacacgcacacaggcgttcaccccggtatgcatgcccagatctctcaacaccaaaacggagttacagcactgtagagacgtgtgcacgccttcccatcacacccacccaccgtgctgtccattgcactggctcgcactcacccgtttacatgcccaacaccgtgccatccttcccctccaggatagttactgctgacattcctggagcactttctgtgtgccaggctcagggactttcgccatccccattttccagagggggaaaccaaggaacagagaggctaagtaacttgcccaaggtcatccagctgtaaggaggtggtaacaaggatcaggaacaggtaggctggctccaaagtcctcacttgacaactatggtgcactactgggcatatcccctcatagttgcatatccttattcatcacacacagacacacccaaccgtctcctcagagtttgcacatgtctgtgtaggcacgcatatgcagccagctgcaggcagacagctcattcatgcctgggacgcacccacagggacagagcagatcccacagggcagcagtgagtggtgagtgtccccttagcccaggcttcctcattctcccagctccaacagcacctccagggcctgcagggggcagttctaggcagcttctgggttcccctccagctgcaggctctccggggtacccgagtatgagctggaggaggtgcctgctcagcctggggaggcctctatcttgatgcgtacccactagcccaggtggtgagcagctgggcccggggaaagcacagctgcccatgttggctccagcagccagagaggctgtgcacccctgcacactttacaaggcctttccccacatacgcattatttcttgaggtctgtagctcctggtgaggggccccaggttcccgatgggcacctgagaggcccaggctctgaggcagggagcagtctgcccaaggtcacagtgccctcgatgtaccaggatttcttggaaaacggaaggctggaggcactgatttccaaggcccctcctggggctcccggcagccgagggcagatgccctgctcttggagccagaaaccttggctagctgccgccacactggtgacctccagcaggctatgctgtttcagagcctcggtctcctcctttgaagagcaggcccagtgatccttggctggtgtgccccatgcttgttggcaccaccagccaggcctgggcgggaaaagccctgcatgactcatgggcctgacatagaggggcatggcatggcattgttcttccttgcctccaagcctctctcccactgccctcaccacctctacctaccctgccaccaccaccctgggaacttgggtgccagcaaaccaaagaggtgaagcttccaggcctttgaccccaccaggaacggctaccctctcgcccactcaacaggttgattgaacacctactatgtgctaggtaggccttgtgctaggagatgcatcagtgcataaaaatccctgctttcattggcagggaacagacataaacaaacaagatcatgccagtcttgattataccaaaaagatgaaatggggcattttaataaagtaacttgcggaatagataaggtggttggggaagacctcctggagctgagacctcgatgatgagaaggagctggggaaagaggcttctagaaggaggaaagggctagtgcaaatgctctgaggttgtaatcagcttagtatttggggatgagccaagaggccagggaaggtggaggctgggggtgggtgaagggaatgggggtgatgaggctgcagaggtgcaaagggttcttccttcccagcccccagcatggtaggctgcgctgaggactgaggcccgggcttggcttccctcctgcttatgatgggaaggtgggggagcaggggagtggggagtgatgtgatctgatttatggtttggaaggattgctttggctgcggcaagcagccgggattggaggggctcaggaggaaggagggggagggcgagactgcagtggtccaggctgaaatgaggtggcttgctgaatgctcagagctccttgagcacacaacctagcgtctgtcgatttcacctcctggagaaaccttccctgactgctccgccagactcctcaccctctcccatctccagccccctcatccccggagctatctggctgctggtctgcaagcagctggagtccccagcatcacccagcccacagcctggcctgcaggaggcttctagtaaagtggccaattaatccccgagccccgtcttccagggtcatgcacacagtcacacgcgtgctcttcacatgtgtcaccctgcccccacacacactcacttggatctccagacaagggcttggagggtaggatgggcaatctagggggcaggaggggccctggagtctcctccattgagtgtgcaggcgatggtggccacagggtaataacaacctcagcgagaccctgaggtctgcccctccttaggaatggccaggcagggaagaagggagcagtgctcggtcccagcatcccaccactgccgagatggttctgagcgggttcctgggctgaggccggggcctgtgttttccaagattccttggagagccagctccatcctcttcctgattatctgatctttgggctacagcagaaggaaagagcagggcggaagcgagctctggaaagtggaaagaggagggtgtgcgaggagacccaaggcgggatctaggctttggaacgttggaggtttccggccacagaggcagggcctccggggagccaagaggggcggggagagacacacacagagaagcagaggagaccaacggaccggacagagacgaggagaggaacaggaagagagaagctgggagaatcgggaacctgggggctagtgacctgcacacagggcaggggcactcggcagttcccagaggccacccctcccaccccagacatccagacatctggaactttgggtgccaagagtccagcttaatgcaggcagcctggcttttgggggctttggtggtcccccagctcttgggctttggccatggggctcggggagcagagagggagtgggagggaggctggggaggtgcccaggaggaggagcgggagagggaggccctgatgctgaaggtgagctctggagtgtcagggagctatgggtggtgaactgtgggtctgggagggggtattgcaaggttagggaaatggacaatgaggagcgattgggatagtctcagaggagtgggagggtgatgggctcagagacaggactcaggcagcagagaatgagttatgagttggaaaggggtgaatggggcatcttggtggcaggctggggctcaccacccctcccctgccccagcatctgcaggaagccctaggactgcctgctgggaggggggatgagaatcctgccggaactgttgagggaaaagaggactgggagatggaggaggaccagggggaggaagaggaggaggaagcaacgccaaccccatcctccggccccagcccctctcccacccctgaggacatcgtcacttacatccgtgagtaaccagaagccctcacccccaaactcctaggccgccgcggtcactttcgcaaaaatgaagggtcggttcactgccaagtggcctttcagttgtccattgcccagcccagagcccccacacccctaggagccccaggtccacggccatgcctcctaaaggcctgggccactcgaccctaccttccaggagtccggggtgccccccccaccgccaccccgccctcaggagccctagatcccagttctccaggtcctcaggccccccgctgcatctccaggctccccctccagcatgatccctgtctgtccgcagtgggccgcctggccggcctggacgcaggcctgcaccagctgcacgtccgtctgcacgcgttggacacccgcgtggtcgagctgacccaggggctgcggcagctgcggaacgcggcaggcgacacccgcgatgccgtgcaagccctgcaggaggcgcagggtcgcgccgagcgcgagcacggccgcttggagggtgagtccgcggcgcgcggggtggaaaaaaatgagactatctgggccaggaatgggactggttgagaaggtgaccctaggtgtccggggcgggagagttcgggagagctgctgtgtgctagcggacggggttagagagctgggaggctgaatgcagggagcgggtgggcactccagacccgcgcggacccgactggggcagcaccacgccccctacagtccagctcccaccgcctggccccgcccctggcggaccagactctccacctcctggctcccgcggttctgaccacgcctcctcccagccctccccatgagttcctggccccgcctccctccacccccggatgttttgtcctcgcccccttccagactctgaatgcatgaccccgcctccttctctacccggccccgcccacaggctgcctgaaggggctgcgcctgggccacaagtgcttcctgctctcgcgcgacttcgaagctcaggcggcggcgcaggcgcggtgcacggcgcggggcgggagcctggcgcagccggcagaccgccagcagatggaggcgctcactcggtacctgcgcgcggcgctcgctccctacaactggcccgtgtggctgggcgtgcacgatcggcgcgccgagggcctctacctcttcgaaaacggccagcgcgtgtccttcttcgcctggcatcgctcaccccgccccgagctcggcgcccagcccagcgcctcgccgcatccgctcagcccggaccagcccaacggtggcacgctcgagaactgcgtggcgcaggcctctgacgacggctcctggtgggaccacgactgccagcggcgtctctactacgtctgcgagttccccttctagcggggccggtaccccgcctccctgcccatcccaccacccggcctttccctgcgccgtgcccaccctcctccggaatctcccttcccttcctggccacgaatggcagcgtcctccccgacccccagtctgggcgcttctgggagggctcttgcggtgccggcactcctccttgttagtgtctttccttgaaggggcgggcaccaggctaggtccggtgccaataaatccttgtggaatctgacttgaggggcagtgaaggcagtcttggactttatctcctgcaggggaagccgggaagggccagaccctggtctttgggcgcgtgtcctggcctttggatgcctgttctgctttttacagatgtcatttgagccccagatggagtgatggagaaacacaggtgcatatgtacacacggtcatctgttctgtgcacagatggccggagtacacgcgtacaaacgctgtagacaccttcacctccatcgtgccctctctctcggcctttgggacccagggcctgccagttgtcccaggccttggtcttggtcctggtcaaagagatttgggaaacgtgaaggggctaaaggctctgacaagtccggcaggaaagagcccgtttaatttgtttaagtggcgtgtccaatttgtttccccagatgatatggtttcatggacttgttgggatgatatattgagacatggacttaaggactcacccaaccctgaagcttagacttcctcccaattttccctcctctgcttcctgccagtgaggccaggagccagtcccttcccctctgtgagcctcgggtttttcatctgaacgtgggcacaatccctcctactttgtgcggctcttgggatgttcaggtgagaccaggacagtgtgcatttggtggtggctgaacttgagccacacactaccttccgtcctcacctttttttttccttttttgagacacggtcttgctctttcgcccaggctggagtgcagtggtacaatcatggcttactgcagcctcaatcttctgggttcaagcagtcctcccaccttagccccccaagtagctgggactacaggcacgccccaccacacctggctaatttttgtatttttttatagaggttggttttcgccacgttgctcaggctggtcttgaactcctgagctcaagcaatctgccctcctgggcctcccaaagggctgggaatacaggcatgagccacagtgcctggctctccctcaccatttttcatacctttactccctgggggcagtgaagacacccaggagtccgccagccggggcctcagcatagtggccagctctgtctagaggagaggctctttggaaatcaccctagtacctcccccaaggttggcatcatgggcgtgaccctgacatcagggagcctaggaatggggatgtgaccctgtctgtccttaccactctgccccttcccttccttcagccattgcaccactgcctaaagggtgaccattggatccacacatgggaggagcaagccatcactgtcagcttggatagaggggagatcacccacccttctcccttcaggagacatttctcagccccacatccccagaggaatacagaataggagagtgggggtgtggcctggagtcagccttccatcagaaattcttctcatgctgagcttcagtttccccggggagggataggcagccctagatcttatagccaaccagaggtcagattaggcagacaatgatgagtatctattatttcccagaggggtctctgccctggcagagcttccattctggaaagtatttgggcatggtacaccatggctacccgcccagattctagagccagatggcccaggttccaatcctacctcagccacttatctcctgggagaacctgagtgagacataaccttgctacttctcagtgtctccatctgtactgtggggataataacagtattgatctagaatagtaccagacacagaggggtctttgcagttcccagatctgagcttcaccagggcaattcaacctcaccttcatctctctgtactctctcctgacactgtgcttttgtatatgcaaagatctccatcctccctcctctctagggtaaacacccacttccaagaattggataacacatcaccccaacaaccagcccttcccccagccccttgcggggttagggatcccctttggtatccacaaaccccttgttcctctcttgacccagccctgatcagacaggctgagggacactccaggtgcgtgggggagggcaggacaaggtatgactatctctgtccccagcatcgcctggcatatgggagccctttgaatgaagatgcttgtgtggcatcatgcaggggaccctgagatgagtcggatctcggctgcttttcctccctggcctccccaaggctgggtgaggcaccttctctagtttcccgtagggtccagggctttccacatcactttaggtgccactgtctggtctgacagacaatgtctgtctccctggcagggcctggagctatcataccaagcacagggccagctgtgggcatgcagagagagaggtctgaagtggggagtggcgtgcctgcaaggacggtttatgcatcagaacagcacgcctatatgtggcattcggcgctgattcctgactctggtctgcgtgggaaacctactctctcctccaggaagcccccccagacttcctgcgggccagagtttgccaatgtcctctccctggctctctgcggagcgctggtagtgtgcaaggccagagccatggaccaggggaggcctcggcagctgattggaatagatgcattaagggatcccagggaagtagtagaacaagggcaggaggcctgggatgattcgacggaggaggaagaaccagcggccgcacgggcttgcagggcgataaagcccaggaggccgagcagcaggcgcatcaccgccttaccagcaccacgtttttccgcagtaaccggatgactcctacgggtcacctcgcaagccccgccccctcctcccatgtgaggttcgcctgcctttccccgcaagcctgagggccacgccttggcggtgaggtcggagctccgcagtctccaatcagagctcagacccctcctctccacccaggcctcgccccgaggtactctggaaaatgtagtcctgtcacgcgcccacgggtaggaaaaccccaagtcgcgaagccttaacattcaactcacgtttggatctctcagacgagagtttttcaaaacaggtgcatttccttgggtagatcataaccactttttaaaaagtgaaaaaagttcgtatgaaatattagtatcatagaaaatggtaagacgcttttcaaaatttaaacgtcgatatgctgaattaacaatataaaattcaatataaaatttctttgtggctaaccactggtccaaaccaacttagtttctttcttttctatttattttcaggttctgtttttttttttttttttttgagacagagtctcactctgtcgcccaggctggagagcagtagtggcacaatcatagctcactgcagcctcgacctcctgagctaaagcaatcctcccgcctcagtttcctgagtagctgggactacaggcgtgcaccttaaaaataaacaaaaacaaaaaacaaaaaaaccagacaattttaatttggaaataattttaaacttatagataacctacacaaatataaacactggagtacaaacaaatcctctactctgatttgtttgttaacagtttacctcattgctttggcttcatcattccatctatccatccatccacccacccacccacccatcctagcccaatcatcagggacaagcaagacaaagtcaggtttgttgacccactgaaatgagagcgatcagcccccagaggagaagctgcaatcaagttataggatttggaagaagagagaaatttggatgaaatttaagtgaaacaatgtttagctaggtttagaacaaggtaggaatgtgtataagggagtcagcatcaggcctgggccgcatacagtagctcatgtctgtatcccagtgctttgggaggccaagacaagaggatcgcttgaacccaggagttcaagacccgcttgggtgacatctctatggaaggaagggagggaggggagggaggggagaaaaggggaggggagtgagggggggagggaaggggaggagaaaattatctgggtgtggtggcacacgcctgtagtcccagccacttgggaggctgaggtgggaggattgcttgggcccaggagtttgaggttgcagtgagctatgattgtatcactgtattccagtctgggtgacagaacgagatcctgtctcaaaaaaaaaaaaaaaaaaaaggaaatatcagatttggactgcaaagtggacctaaggtcttgtttccctggaaactacaatgttaatataaatgtggcatgctgtgcccagaaactttttatttaaaactctgcaccagggctggaaatggaggcttcttatctttgtcaaagtgacagatcttccaggaaagaaagatgagtctgtttcattcttacggatagactttcataccgcagagtttcccacagtctatgattttagagaacaaagtttctcagtgagtaagatagcagtagtcgctcataaagggggctgttagaacacttttactgctgcagctcgcccctgggtgaaatgtgtcctgttaaccttgcggttggctttatctcagtctatagatgaagggcaggccagatttttatagtattagctggctttagctcatatatatatatatataatttttcttttcttttgctgcctttctttttctttctttctctctcccatctttctttcctttttcttttgtctttttttttttttttttttttgagatggagttttgctctgtcattcaggctgaagaaccatggtgcaatctcggctcactgcaatctccacttcctcagttcaaacaattctcctgccgcagcctcctgagtagctgggactacaggtgcctgccaccacacctggctaatttttgtatttttagtagagacaaggtttcgccatgttggccaggctggtcttgaactcctgacctcaggtgatccacccgcctcggccccccaaagtgctgggattacagttgtgagccaccgcgcccagccagttgtcatgtctctttagcctccttgaatctggaacatttccatatttataatattgacattttggtggccgggcgtggtggctcacgcctgtaattgcagcaggttgggaggccgaggcgggtggatcacgaggtcaggagatcgagaccgtcctggctaacatggtgaaaccccatctttactaaaaatacaaaaaattagccgggtgtggttgcaggcgcctgtagtcccagctactcgggagcctgagacaggaaaatggcgtgaacccaggaggcagagcttgcagtgagccgagatcacgccactgcactccagcctgggcaacagagcaagactccgtctaaaaaaaaattttatatatatatatgcacacacattttggaagaacagctccttgcccttttaaaaatagaagttccacatttttagtcggtctgatgtttccccatgatgattagattcaagttatacattctccaccagaataatgaggtgaggtgtgtacttctttgaaggtatcccatctggacatagtcagtgtcctactgtgcctcattagtgaagtgagttttcatcacccagcgagctgatgtcccattccccagctctataatactcctttgcagctaataagcagtccaggggcagatactttaagacaggcagtatctgcctttcatcaaaatttcccccttgatttcgcacccattgatgattcagctgatgtgggcttattatgaataacaaaagatgctcctggcctggtagggtggctcacgcctgtaatcccagtactttgggaagctgaggcgggaagatcacttgaattcaggagtttgagaccagcctgggcaacatagtgggatcttgtctctaaagaaaatataaaaattagcctggcatggtggcaagagcctgaagtcccagctacttgggaggatgaggtgggaggattgcttgagcccaggaggtcgaggctgcagtgagctgtgatcatgccactgcactccaacctggacaacagagggagaccctgtctgaaaaaaaaaaagacaagaaaaagaataggacgttactgttaaacgccttctcccatccccctcgccagtacctaccatcctgacttgtgtttcgccgttgcttgattttcattattattttagcatgtgtgtatgtttcccaaaaaacatcttatttagttttgcttgttttttgggctttggagtaataatacacgtattcgttgtctcgaactgcccttataaagtaccacaggctaggggactgaaacagcagaattgatcatctcccagttctggaggctggaagtctggagatcaagatgttggcacggttggtttcttctgaggcctccttctttggcttgcagacggccgccttcttgctgtgccctcatgtggtcctctctgtgtgcacatccctggtgactctctgtatggccatatatcctcttcccataaggatgaagtccaattggattagggcccaccctaatggccccatttaaccttcaccacctctttagagatcctatctccaaatacagtcatgttctgatgtactgggggttagggctccaaaatatgaattttgggggctgcatttcagctcacaaccatatcttactgtatgcaacttgctatttttttttttttttttgaaacagagtctcgctctgttgccctggctggagtgaagtggtacgatctcagctcactgaaacctccgcctcctgggttcaagccattcgccttgcttcagcttcccaagtagttgggactacaggcacacaccaccacacctggctaatttttgtatttgtacagatgaggtttcaccacgttgaccaggctggtctcgaacttctgacctcaagtgatccacccgcctcggccttccaatgtgttgggattacaagtgtgatccattgcaccctatcaatgcaacttgctttttaaagacaaactcctatcactaagatgcgttcgtgatggtgcctgtagcttttgtttgcacatttttcaggggtatggtatgaaaatgcttaaaaataatgtggggagaaatcgatgaaatggatgggggaagaaaagaagattaacaaaactaaaagctattctaatttttgaaaaagcaactaagacagacttacttttggcaaaccgattaagaacaaagagacaggctgcaaataaaatacaaattgtaaagtggtgaataattacagccaggacagagatataaaaagtaattatattatggctatgtgctaacattaaaaacctgaatgaactggttaaattactagcaaaatatacaatgcgaaaatgacacaaaattacagactgaataagccagtgactattgaagaatttgaaattatattcagagatctcccctctccccaaaaaacccccaggcacagatggttttctaagcaagtgataccaaacattcaaagaatgtttaattcctatcttgtatgaattattccagaaaatcgctggaaaattatgtaataactgcctgattcatttttagagactaatgcaatgttgaatccaaaatcggataaggaccagatgcaagaaaattatagattcatttcgcttgtgaatgaagatgtaaaaatcccaaatcaaataattgccacttcaatccagcatatcataattcttcatgatcaaataagatttctcctcctaatgcgaagatggttcaaaaattaaaaaaaaattctttcaatataattcaccatatcagtagaccaaggaagaaaatataatgatttcaactgatgtgggaaaataatttcataaggctgtacatctatttacgattaaaagttaaaacactccactttgggaggctaaggcaggaggatcgcttgagcccaggagtttgagaccagcttgggcagcacagtgaaaccatgacatggtggtgtgtgctggtggtcccagctacttgggaggcagaggtgggaggatcacttgagcctgggaggctgcgtggttttgaattgcatttctgtgatgattaatggtgttaatattttcctggacatttagcccatttatatatcttctctgggaaatgtctgttcagatcatttgccccttttttgtttggtcgttttattttattttttgagacggagtctcactctgttgcccaggctggagtgcagtggtggaatcccggctcagtgcagcctccacctcccgggttccagcgattctcctgcctcagcctctcaagtagctgagattacaggcacccaccatcgtgcccagatagtttttgtattttttagtagatatggggtttcgctatgttggccaggctgctctcaaactgctgaccttaagtgatcttcccgccttggcctcctaaagtgttgggactacagctgtgagccaccacgcctggcctcacccattttaaaattgggttacttgagttctttgcacattttattttttgtttttgctttttggagggttactgtatacatcttaatttatcagaatcagtttcagatttatactagctttattacagtgagatatagaatggttattcctagatagttctattccatttccccttgttgtggtatcattataaacttttttttttttttttgagacggagtcttgctctgttgcccaggctggagtgtggtggtgcagtctcagcttactgcaacctctgcctcctgggttcaagctattctcctgcctcagcctcctgagtagctgggattacaggcacctgccaccacgcccaggtaatttttgtatttttagtacagatggggtttcgccatgttggccaggctggtctccaactcctgacctcaggtgatctgcctgccttggcctcccaaagtgctgggattacaggcatgagccactgcaccagacagtaatgcattaagctttgaatacctaagctcaagagttgacatcaacctttccccacagataattctggtgcttgtgaactagtggtctccgtagatgtttgccaccaagaaggtcctggggactcgcaaaaacagtctgtgggagatggatatgtgagtctgcttctaagaggctctttggccgcctctggcacacggggccatctctctcctgcttgccctctgccctcttctctccctccattttccataatttcaacaaaatcagttaatatttacaaagcactgagaacagcacttgggactcagtaggtgctaaaaaaaatcatcagctgcttcttttttttttttttttttttttagacagaatcttaccctgttgcccaggctggagtgcagcagtatgatctcagctcactgcaacctctgcctcctgggttccagcaattttcctgccttggcctcccaagtagctgggattacagatgcctgccaccacacgagctaagttttgtatttgtagtagaaacagcatttcaccatgttggccaggctggtctcgatctcctgacctcaggtaatccacatgcctcggcctcccaaagtgctggaattacaggcatgagccaccatgtctggcccatcagttgctattattagcattattccttctggggaatgttttagatactgcatttcatggactctaagaaactccacttttatggttgttacaaagaaagaaaagtgtatactgtctataagatgcaacaatgcttccttaccacttggaatttttatttcttatttactgaaagagcttttatgggtgtatttattgcgaacaataaaggaaaatacaagtaaaataaaggattcctaaaattgttccacaattgagatcctttttttttgtttattatggaaaagttatacaaaaattagctggacatggtggtgtgtacctgtggtcccagctactcgggaggctgaggtgagagaatcacttgagcccgggaggtcgaagctgcagtgagtcgtgatggcgccattgcacgccagcctggatgacagagtggcgggagggagaccctgtctcgaaaaaaaaagaaaaaaaaaggttgcgtgtaagaactaaaaatcattactgctgggctcttgatccagctttgcaattagaggagacagtttattgctgacttctgttttcagagcaaacaccaaacacaacttattccccaccaattccccctgacccacccaggcccaccaagttggttcccgggggctgagagtgccccactcttgtctgctggattttcttctgggctgtggacaccccttctgcaggttttcatgcctttcaaacagcagtcgtatggtgccagacgttgaaagatgccttccggtttcagaggcgtcaagatatgggaaaagtggcttcttagaattgatcagttacgatgtgtttttcaaaggtggcgtctcctttactgcaggcagttccttctctaagggagagcttgtgggatgatggttgttctccccaggctctactctgcctggatttgggcactgcttattgccaagctgatatcctaactaatattttcaagtgggcagcctggtttcggatacttaatttctagcagcatttcccctgctgccacgccatcttcagtcttttaaaattgtagtaccctgggaagagtttatggcattcttacccaattccttcttggcgcaaatttaaggtttttttgtttgtttgtttttttccttccctaagtgttttgctattgcaatgtcaaactaaataagaaacacagagaggcttccaaaagaaaatatgttatctgggaatagatcactgcagtgggaaatgcatgtcatagtaaactatgtgcgtatgcagggaggtaaaggaagaagaaggtttttaaagggaaagaagaggaggattacatattgtttcgaaataattatccttggctgcaaagatcgataataaaggtgacaccagtctgagggtgaacaggcaattgtgggggagatgtccttgagtatttttggtggcaggttgtgatggcttttgtgccaggttgtggtttttatagagtcttgtaataggtgttgttggtttttgtttttgtttttgttttattttgtttttgagatggggtctcactctgtcacccagactggagtgcagtggtgtgatctcagctcaatgcagtgcagcctccaactcctgggctcaagcgatcctcccacctcagcctccggagtagctgggactacaggcacataccactatgcccagctaatatttggtattttttgttgagatggagattcgccatgttgcccaggctggtctccaactcctgggttcaaattgagcctccctcctcggcttcccaaagtgctgggattacaggcatgagccctcataccacgcatgtgatagtttttgttatcaagcatacaagcatgataaccctctcttcgtggctctagttgtcaatgtttaaaaatattagtacctagggatgggtgcggtggctcacacctgtaatcccagcactttgggaggccgaggcgggcggatcacgaggttaggagattgagaccatcctggataacacggtgaaactccgtctctactaaaaatacaaaaaactagccaggtatagtggcgggcgcctgtagccccagctactcgggaggctgaggcaggagaatgtcgtgaacccaggaggcggaacttgcagtgagccgagattgcgccactgcacttcagcctgggcgacagagcgagactccatctcaaaaaagaaaataaataaataaatactagtaccgagggatgggcgcggtggctcacgcctgtaatcccagcactttgggaggccgaggcaggcggatcacgaggtcagaagtttgagaccagcctggacaacatggcaaaaccccgtctgtctgtactgaaaacacaaaaattagctgaacgtggtgttgctcccaagtaattccagctacttgggaggctgaggcaggagaatcgcttgaacccgggaggtggaggttgcagtgagctgagatcacgccactgcactccagcctgtgccacaagagtgagactccgtctcaaaataaattaaatacataaataaaataaagacaaaaatgttagtacctctattttgattttggtgatttttacaataaatagtgctgcaaatgacacctttggggatgaagcttttgtccgtgtttaggattttttctttggtctcgattcccacaagtggaccccaagaaagaaaagatcttgtttctgtcactcagaaggtcctgacaaccctacaaccgagcaggagagaggctgccctggcctgccgcaccgccccgggaattcctgtgagattgttccctggttgttgatggacggggttggattttgatttcttgtgtgcgggagcgtcttcctgccatgatggttggccactccctctctttccgatttgcagatgtgtctccttgtcttttgcccacttgcctactggaatccaactttgttgcttttctgtgtggtttacatgataagattattgacgctatttctgtcacaggggatataagtttttttccaagtctatttcttgacttataattttagtgtgagttttgttttatacacagagattttaatttaaaggctgtcaaatctgtctccttaatatgagaaaaaaggaaaaaaattagcattttttaaataaaggcataatttgcatacagcacaattcaccctttttaggtgcagttctgaggttttggcaaatgcacgcatcacgtgaccaccccgcaaccaaaacacagaacagttccatcaccgcaaattccctcacaccccgttacggctcaagtgttcaaaacataagaaagctaaaagaatagacgtgaataggcaattcttttctccgggttgctctatgttttaaaagattgacccccaatttttttgtctttttttcttgaataaaaccgaaaatgccaaatttcagggggaggaattgcagctcaaactaaaattggtagttaaagagtcccctgccatccttgttcttccctcagataatgagaattgttaacaagttccttcctttccctccttccttccctccttccttccttccttccttccttccttccttccttccttccttccttctttccttccttccttccttcctccctttcctccttcctttctttaaatagagatgggttctcaccatgttgcccaggctggtctcaaacccatcctgggctcaagtgatcctcctgccttggcctcccaaagtgctgggattacaggcatgagccaccgtgcccacctaagtctttcttttgagggctttctctctgccttttatttctcttcacgtattcattcacgcaccaggcacaggtggagccccgccatgcacgcccgcatctgtgcgtgttccacagtgtgcaccattcctgggctccctcatgcatttcacctaacagcatcattgtcacgttctcctccaccatagcacagagcgtctaagggtgccaccctctcccataactagagacacatgagtgacagcagcaatgagctgtcccatctgctagtcgtcgacacagaagagccagactgagagagctgggtgccaatcacaccacgcagggacaggctgtctgcccagaggaggccggtggtgtccacacctgcctcgctggggccgtttcaacacaaatcttccagcagttcttaactgaacgtctgacctaccgactccactttcgggagtttatcctttggtgatattttctcaaagggccaataatcacagtggctcacagaaaagagttctccgtgtttgccggatatcctgctgagaatttgacactttgatctcatttaaaccctgcaacaaccttgaggtgggtgctgttgttacttccatattagagcggaagaaaaggaactcagagagatgactttacttatccaagaccacccagccaggcggcagggctgggaacccaagcatgaagtgaaatagccccgccctggactggctggatggtagccacagtctacatgtgagtaagacactgaatttaagaaaagaaatcactttattaagatataatttacataccatgcaattcacccacgtaaagagtaaaattcaacggttgttggtatattgcgttattcatttttaacattatgttaatgtgtggcataaaatttccattgaaccgtttttaaatgtataattcagcggcattaattacattcataacgttgtgtaaccatcaccacaatctatttaaaaactttttcatcccccccaaacggtaactctgtaaccgttaagcagtaaatcccctttctctctcccccattgcctgatgaagtaggaggtgggactagactctggaggtgggacttgcactcaggatcaaattgaagaccagctgaaacagggaagaggggaaagcgcttctccataagacacgcccaccagtgccatgtcagtttcccgttgccatgacaacaccccgacgttaacacccctctccatggcagtgacttgatgacctggaggttaccaccctttttctagtcactagtggataatctgtaccttaatttgcatataattaaaagtgggtataagtatggctgctgggcacactgcctatggggtagcctttcaggcaaggagcagtacccgtgtcgctgctgtacactgcggcttcgataaaagttgctgttggttaggcatggtggctcacgcctataatcccaactaggaggctgaggcaggaggatcacttgacatcaggagttcgagaccagcctggccaacatggtgaaactctgtctctactaaaaatacaaaaattagccaggcatggtggtgggcacctgtaatcccagctactcaggaggctgaggcagaattgtttgaacctgggaggcagaggttgcagtgagccaagattgcagcactgcattccagcctgtgcagcagagcaagactctgcctcaaaaaaaaaaaaaaaaaaaaaacaaaacagttgctgtctatactttctgatgacaggtaaaaagaagttgctgtctaacacctccagctcacccttgaattatttcctggccaaagccacgagccctcccaggccaagtcccaatttggggtctcacctgtctagcatccctgggacaacagtaggagccgcttgagcttgtggcttctcctcagcaaatatgggaaacagagaaagatctggaatcagacagaggttggtgtcatttctgcctgttgtaacctgtcatctagggcaggtccctctcttcctggggctctcagtcaggttctgtacaaggttctcaccctccccacggaaggaggctgccaggaggagccagcaaagctattcaacttgcaggggctccagaatagcctctcctgtggcctctgtccactccctacccctgcaccttcagcaattcccacccagtggcgaccgtaagatgcccagacacagagcattatttctgctctttcactgcatacccaatgttagtccaaactgcaccattttggaagccttctgccattttgcaggtcaaagtgaaatattccacgggggttcaggcggggagaaacatccttatcataccctgccgtgcaaaggcccgactgaaggaaaaatccctgtcatatcctgctgggcaaaggtccaaggaatatcttatcacatcccactggaaaaagggccaaaccgcctgatcgcacatcttatcaatatcctgccaggcagcaagccacactgctcagacccctcccacccatacctttaagtaccccagcctataagcggccgtgggctctggccctaagctggtcccccatctccgcaggtttttgcaatatacctatgttgctgttgagcccctgtctctctctctctttccctctctctgtttgtgtttgtttgtttgtttttttgagacggagttttgctctttcacccaggctggagtgcaatggcacgatctcggctcactgcaacctctgcgtcccgggttcaagcaattcccctgcctcagcctcccgagtagctgggattacaggtgcccaccaccacgcatggctgatttttgtatttttagtagagttggggtttcaccatgttgtccaggctggtgtcaaactcctgacctcaggtgatccacccatctaggcctcccaaagtgctgggattacacgtatgagccaccgtgcccggcctgtggtgtcattctttaaccctcgccttcccttcaaaacctaacaccctaaggactggaatgcctgcgccacatactcagccatgtgggtgggtctgagctctggcctgggctccctgtggggaggctggttgggagaggagacatgatgggattccagccctgggactcactgccttgtcactggagcgggtttcctcagctctctaggtctcactttattcattctgcagtgaacattccctgagtccctgctgtgaggctcacacagctgtatccaaccaggagctccatcctaaagggatcccaagaggttcttcccccaatttcccagttctccaacatcaaccaggtgcccaaccattcaattcagttccaacattgactgcccagagttagtgtcagatgctgcaggttatggacttgggccacaaaactgcccccacctcaggccaggcgtggtggctcacacctctaatcccagcactttgggaggccgaggcaggtggatcatgaggtcaggagttcaagaccagcctggccaatacggtgaaacccccgtctctgctaaaaatacaaaaattagctgggagtggtggcacatgcctgtagtcccagctacttggaaggctgaggcagaagaattgcttgaacctgggaagcggaggttgcagtgagccgagattgcaccactgcactccagcctgggcaacagagtgagactccatctcaaaacaaaacaaaacaaaataacaagcaaaaaaaaactgcccccacctcagatgccagctacagtagggtgtccacactaccttaatttctgcccagccaatcaccagttcaggggttcccaaaactctcactgatatggtttggatgtttgtctcctcgacaaatctcacgttgaaatgcgacctccggcgggcgcggtggctcacgcctgtaatcccagcactttgagaggccaaggcgggtggatcacgaggtcagcagatcgagaccacccgggccaacacggtgaaactccgtctctactaaaaatacaaaaaattagccgggcgtggtggcgggcgcctgtagtgccagctactcgggaggttgaggcaggagaatggcgggaacccgggaggcggagcttgcagtgagccgagatggcgccaccgcactccagcctgggccgcgccaccgcactccagcctgggtgacagcgagactccgtctcaaaaaaaaaaaaaaaaaaaaaaaaaaaaagaaatgcgacctccaatgttggaggtggggcctgatgggaggggtttgggtcatggggcggatccctcatgaatggcttggtgctgtccttgcagtaatgagagttcccagtctgtgagctcgtatgagatctgactgtttaaaagagtctgggtcggcgcagtggctcacgcctgttaatcccagcactttgggaggccgaggcaggtagatcacctgagatcaggagctcgagaccagcctggccaagatggtgaaaccccatctctactaaaatgcaaaaattagtcagatgtggtggcccatgcctgtaatcccagttactcgggaggctgaggcagaagaattgcttgtccccgggaggtggaggttgcagtgagctgagatcgcaccaatgatctgcactccagctggggcgacagagtgagaatctgtctcctgccccacatcaaccaaaaaaaaaaaaaaaaagagagagtctgatacctcttccttctctctcttgttctatctctcattgtgtcatgtgctggctccccctttggcttccaccatgattggaagccccctgaagccctcactggaagcagaacagatacaggtgccatgcttgtacagcctgcagaacagtgagccgaatacatctcttttctttatgaatgacgcagcctcagacattcctttatagtaatgcaaatggaataaaacacctactcaaatacactaattcgctacaggttgggcacagtggctcacgcttgtaatctcagcactttgagaggtcaaggagggaggattgcttgagcccaagagttggagaccagcttgggcaacatagcatgaccccatctctaccaaaaataaaataaattagccaagtgtggggacatgcacctgtagtcccagctactcaggaggctgaggcaggaggctcatttgagtccaagagattgagagcacagtgagctatatgatcaggcaactatgctccagcctgggtgacagagcgagaacttgtctcagaaaaaaaaaaaaaagaaaaagaaagaaaagaaaaagaaaaaagaaaaaacaatcactagaacaactcacagaattcaggcaagcattttacttattattactggtttattataaaggatagaactcaggaatgaaagagatacatagagtgagttatggggaagagcatggagctgccaggtcctctccaggcaccaccctcccagcacctcaatgtgctcaccaggcttcatggtccaggggctgtgtgtatatatgtgtgtgtgtgtgtgtgtgtgtgtgtgtgtgtgtgtgtgtgcgcgtgtgtttgagatggagcctccctctgtcacccaggctggagagcagtggcgtgatcttggctctctgcaacctccacctctcgggttcaagtgattctcctgcctcagccttccaagtagctgggattacaggtacgtgccaccatgcctggctaatttttatgcattttgggtagagacggggttttgccatgctggccaggctggtctcgaactcctgacctcaggtgatctgcccaccttggcctcccaaagtgctgggattacaggtgtgagccactgtgcccagcctctttgtattgctcttgtaacttttctgtaactgtgaagtgatctccaggttaaaaaaaaaatgtaccccgcataatctcacttatatgtggaatctaaaagagtggaactcggctaggcgcagtagctcctgcctgtaatcccagcatgttgggaggccgaggcaggaggattactggaggccaggagtttgagaccagcctgggcaacatagcaagatctcatctctaaaaaaagaaagaaagaaacgaaaagaaaaatatgaacttgttaacaattctcattatctgagggaagaacgaggatggcaggggactctttaactaccaattttagtttgagctgcaatttccccctcatttagcattttcggttttattcaagaaaaaaaaaagacaaaaattagggttcaatatcataaaacatagagcaacccggagaaaagaattgcctattcacatctattcttttagctttcttacgttttaaccacttgagccgtaacggggtgtgaggggatttgcggtgatggaactgttctgtgttttggttacggggtggtcacgtgatgcgtgcatttgccaaaacctcagaactgcacctaaaaagggtgaattgtgctgtatgcaaattatgcctttatttaaaaatgctaactaattttttctcttttttctcatattaaggagaccgatttgacagcctttaaatcaaaatctctgtgtataaaactctcactaaaattatgtcaagaaatagacttggaaaaaaacttatattccctgcgacagaaatagcgtcaataatcttatcatgtaaaccacataaaaaaggaacaaagttggattccagtaggcaagtgggcaaaagacacggagagacgtttgcaaatcgtaaagagagggagtggccaaccatcatggcaggaagacgttcctgcacacaagaaatcaaaatccaaccccgtccatcaacaagcaggaaacaatctcacaggaatccccggggcggtgtggcaggccggcgcagcctctctcctgctcggttgtagggttgtcaggaccttctgggtgacagagacaagatcttttctttcttggggtccacttgtgggaatcgagaccaaagaaaaaatcctaggccaggcgcggtggctcacgcctgtaatcccagcactttgggaggccgaggcgggcagatcacgaggtcgggagatcgagaccatcctggctaacatggtgaaaccccgtctctactaaaaatacaaaacattagccgggtgtggcggtgggcgcctgtagtcccagctactcgggaggctgaggcaggagaatggtgtgaacccgggtggcggagcttgcagtgagccgagatcacgccactgcactccagcctgggcgacagagcgatactccgtctaaaaaaaaaaaaagaaagaaagaaagaaagaatcctaaacacggacaaaattttcatccccaaaggtgttatttacagcactatttttaatgcaaaacagttagggaggaaaaaacaacacttaaatttgccaagaactgattgggtaataatgccataaaccaccgtgaggtactatgatttaaaaaaaggttcagagccggcagagcagcggtggtgagtggctggtaggagatgaacataaagctgggggccgggcacggtggctcaggcctgtaatcccagcactttgcgaggctgaggtgggtggatcacctgaggtcaggagttcgagaccagcctggccaacatggcaaaaccccatctctaccataaatacaaaattatttgggtgtggttgtgcatgcctgtaatcccagctactttcgaggctgaagcaggagactcgcttgaacttgggaggcggaggttgcagtgagccgagatcgtgccattgcactccagcctggacgacaaaagagaaactccgtctcaaaaaaaaaaggatgaaatcttgtgctttgtggtaacatgcatgcggctggagaccattatcctcatggaattcacgcaggaacagaaaaccaaataccacatgttctcacttataagtgagagcttaacattgggtactcatgatgtaaagatggaaaaatgggcactggcgactgctagagaccggaaagggggaggcggcgagggttgaataaccaactgtaggggactacgctcagtacctgggtggtggggtcattcgtaacccaaacctcagtatcacgtaatatacccaggtcggccaggcgtggtggctgacgtctgtaatccaagcactttgggaggccgaggtgggcggatcacctgaggtaagaagtttgagaccagcctggactacgtggtgaaaccccgtctctactaaaaatacaaatatcagccgggcgaggtgttgtatgcctgtggtcccagctactcggcaggctgaggcaggataattacttgaaccccggaggcggaggttgcagtgagccgagattgcaccattgcattccagcctgggtgacggagcaagactctgtccactgcccccgccccacaaacatacatatataaatatataactattatatataaatatataatatatatctattaaatatataacatataatatttatatctataaatatatatgaatattatatataaatatataatatttatatctataaatatatatgaatattatatataatatataatatatatctattaaatatatataaatattatatataaatatataatatatatctattaaatatatataaatattatatataaatatataatatatctattaaatatatataaatgttatatataaatatataatatatatctatgaaatatataaatattatatataaatatataatatatatctattaaatatatataatatataatatttatatctataaatatataactattatatataaatatataatatatatctattatatataacattatatataatatttatgtctataaatatatataaacattatatatatattatatatctattaaatatatataactattatatataatattctatatctataaatatatataactattttatatatctctctctctctttctctctctccaggtccatgtaccccctgaatctaaaataaaaggagaaaaaaataccagaatggccaccaaaacaaagcaaaaaaggctgaatgttgtgtgcagcaggagaaatacatttagaatttcaccatgggaggaggtaatccccaaatccaggcagagcacagcctggggagaacaaccgtcatctcaccagctctccccggtgttgcccttagaaaaggaactggtttcattttttaaattattatttgtttttgagatggagtctcactgtgtcacccaggctggagtgcagtggcgcaatctcggctcactgcaacctccgcctcctgggttcaagtgattctcctgcctcagcctgtcgggtagctgggacgacaggtacccgccaccacacctggctaattttttgtatttttagtagagatggggttcaccatgttggccagggtagtctctaactcctgacctcaagtgatccgctggcctcagcctcccaaagtgctgagtcactgcgcccggccttcacatgcactctttaaagcaacaccaggttgacgtctacttgggtttcacaaactatgacccaccgcccaggccaaatctgacgcactgcctgttttggggcagtcggtgagctcatggttaagcaaaatcaaaagaaggataataatgttcacgacacacgaaaatgatgtgaagttcaaaattcagtgtccataaataaagttttattggcacaaagccctgcccactcctttacctgtttttcgtgaatcttccgtcatcccacaacagcagagccctcctacctcagcctcccaagtagctgggattacgggcatccgccaccacacctggctaattttttttttgtatttttagtagagacggggtttcaccatgttgtccaggctggttttgaactcctgacctcaaatgatctgcctgccttggcctcccaaggtgctaaaattacaggaatgagccaccatgcctggtaactgtatttctcttaaaggggtcctttcttttggaaattgatgctgaaatatttatttatttatttatttatttattgagacagagttacactctgttgcccaggttggagtgcagtggtgtaatctcaactcactgcaaacctctgcctcccgggttcaagcgattctcctgcctcagcctcctgagtagctggggctacaggtgtgtaccaccatgcccggctaatttttgtatttttagtaaagatggggtttcaccatgttggcaaggctggtcttgaactcctgacctcaagtgatccgcctgcctcggcctcaggtggatcacctgaggtcaggagtttgagacaagcctggccaatatggtgaaacctcgtctctactaaaaatacaaaaattagctgggcgagatgacacccacctgtaatcccaggtactcgggaggctgaggcaggagaatcgcttaaatctgggaggtggaggttgcagtgagccaagatcgcaccattgtgctccagcctgggcgagagagcgagactccaactcaaaaaataaaataaaataaaataagcattggattgcattttttaggctgtgtctttgtgataccttaccctgttttaaccggagtgactgtctcctagcagagagagctggacagactccattttggtttcttcacttggggccccccgtatcccccttaagggaataactagtgcaagctgacaccaagcacatccaggaatgcacctgctgataagatattgaggcagcctgtattagcagctcctgctcggtggaaggtacctaaaagcccctgcatttatctcttagtgatagtttaagcccctgcacctggaactgtttattttttgtaactgcttccataaccaattaattttttaactttttgcctgttctgcttctgtaaaactacttcagttaaactccccctcctctatttagaccatagtataaaagagaatctagccccttcttcgagatggagagaattctaagcgctagctgtctctcagtcgctggctaataaaggactccataatttgtctcaaagtgtggcatttctctctaactcgcttggttacaacatcttgtctttctggtgacacctgttgacatgatgtgccttagagtcagtgaaatgttactgctgaggccgcagcattctcccgagggaataaagccatgtgcagcataacgaggtttctgtcaatgacagactgcacgtccgacggtggccccaccgattataatggagctaagactgcaattgcccggtgatgttgtcgctgtcctaatggagtagctcaaggcgttactctaatgtttgtgccgatgctggtgtacacagacctacttgactgccagtcatagaaaagcatagcacatataattgtgtacagtacatcatacctgtcaatggcaacgggcaggacatggtggctcgcacctgtaatcccagcactttgggaggctgaagtagggcaatcgctcgaggccagaagttcgagaccagcccatgcaacatagtgagaccctgtctctacaaaaaagaaaaaaaagtcaataaacaactatgttactggtgtatatatttactatatataggtttctttgtttgttttttgagatggagtctcgttctgtcacccaggctggctcactgcaacctctgcctccccagttcaagtgattctcctgcctcagcctcctgagtagctgggattataggcatgcaccaccatgcccgaatactttttgtatttttagtagagatggggtttcactatgttggccaggctggtctcgaactcctgacctcaagtgatccacccactttggcctcccaaagtgctgggaaacaggtatgagccaccacggccggcctttattcaccgtactatagtttttattgttattttagagtgtactccttttacttataaagaaaagttaactgcttgagtctaagagttcgagaccagcctgggcaatatagtgagacttagtctctgcaaaaaagaaaaaaatgtaaaaattagcccagtgtggtggtgtgtgccttagttcccgctactcaggaggctgaggtgggaggatcgtttgagcctgagaggcataagctgcagtgagctgagactgtgccactgcattcccgcctgggtaacagagtgggaccttgcctcaaaaaaaaaaaaaaggaaagggaaaaattaactgtcaaaacagcctcaggcagctccttcagaaggtgtccagaaaaaagcactgttatcctaggagacgacagctccaagggtgttattgcccctgaagatcttccagtgggataagacgtggagatggaagacagtgacgttgatgatcctgaccctgcataggcctaggctgatgtgtgtgtgtttgtgtcttacattttttctttttctgagatggagtcttgctctgtcacccaggcaggagtgtaatggtgtgatctcggctcactgcaatctctgcctcctgggttgaagtgattcttttgccttagccttcccagtagctggaattacagcactttgggaggccgaggtggacggatcactggaggtcaggcgttttgagaccagcctggccaacatggtgaaaacccatctctactaaaaatacaaaaattatccaggtgtggtggtgcatgcctgtaatcccagctacttgggaggctgtggcagaagaatcgcttgaacctgggaggcggaggttgcagtgagttgagattgtgccattgcaaatcagtgtgggtgacagagtgggactccgtctcaaaaaataaatagatggtcgcatttgggctatggcctagacccctgtgctagatcatctggcacaggtgtgtagcagactctcccacctaggtttgtgtaagcacactctatgatatctatacaatgatgaaatcacctaaggatacatctctcagaatttattcctgatgttaatcgaagcaggactatagcagtattaataacgagacctaacaatgcttgagcacctactatgtgccaagaagttttttttgttttgttctgtttttgtttttgatgaatctcactctgttgcccaggctggagtgcagtagctcaatctcgaccggctgcaacctccacctctgaggttcaagcaattcgcctgcctcagcctccgaagtagctgggattacaggcacccaccctgatgtctggctaatttttgtatttttagtagagacagggtttcgccatgttggccaggctggtcttgaactccttgtctcaggtaatccacccgccttggcctcccaaagtgctgggatcacaggcgtgagccaccgagcccggccgcaagaagttttaagtgttttgtatctcttaacaaatttcattagcacaaagagggcagaggagaattggaatggccttgcggaaagacctccctggcacccgcctcctccttatgccccaagcctgcagcccctggggcctattattagggcccacatctggtgacatttcccggactgatagcgatctctgaagctcttgctcaaggttctttcctggacgtttatctgctccaaaactcacagctagcttcctgccatcagccccctacctttaacgtgggctcaaggctggcggccacctgggactgacgacagagacagaaagagccccctcaccttgcctcaccctcagacacagcacaaggtgacgggaccgggattcgttgcggggtgtgtctcagggagccaggaggtaggagcttggggattaggagagttgaagggcactctccagggtatacaaaaaggaggtagtgggctgggcacagtggctcacccctgtaatcctagcacttagggaggccgaggcaggtggatcacctgaggtcaagagttggagaccaccctggccaacatagtgaatccccatctctactaaaaatacaaaaaccagccgggtgtggtggcagctgcctgtaatcccagctacttaggaggctgaggcaggagaattgcttgaacccaggagacagaggttgcagtgagctgagatcgtgccattgcactccggcctaggcaatagagtgagactccatctcaaaagaaaaaaaaaaaaagaggtggcaaaaaggggctgaaagttctgggccacctcctctgggtgaggaatgttctcatgccatatgcgtgaactgtgcctggtcagaggtatttgactgtcttcatcactgcggtacccccagcgcttaggatagtgtctggtgtacaatttgggctcaatgcataattttacactaaatgaatgaatccatcctcagatgacaaaggagagattgccctccttaatggatcactcatcgattatttaccaagtgcctgctgtgttccaggggccaggagcaagccacacaccagcctcgcctctagggaactcagagatgaataatgcagatgggtgatcaccaaatgatccaacaaacgcggtctaattgctgctgcctgtaaccagctctttttttgtgggggctcggggggaacggggggacaacagagtcttgctctatcacccaggctggagtgcagtggcatgatcacagttctctccaaactccgcctcccgggttcaagcgattctcctgcctcagcctcccaagtagctgagattacaggcatgcaccaccacacccagctaatttttgtatctttagtagagatgggggtctcaccatgttggccaggctggtctcaaactcctgacctcatgcgatcctcccaccttagcttcccaaagtactggtattacaggtgtgagccaccgttcccagcctgtaatcatctcttcatgggagagaagctcctataggagggtctgattgaaaagggcaggaaaaactttggggagaaagtgaaatttgcactgagatcgcaggaatgagttaaaaaaaaaaaaaagcagaggaaagaaaaggtgttccaggcagaggggcagcacatgcaaaggccctggggtgggagggagatgagaatcttggcaatggacacaaaggtagggaagccgggatttggtgcacaaagagggggaaggtgcaagagaagtctggagaggctggcaggtgccccagctctcaccagtggtgccggggagactcatatttatcccacaagcaatgaagagccacagtgtaattttccagtttgaactgtattttttttttttttgagacagggtctcactctgttgcccaggctggagtgcagtggcacagtcatggttcactgcagcctcaatctcctgagctcaagtgatcctcgtgcctcagcctctcgggtagctggaattacaatgcaagccacactgtttggccaatttatttttattttgtagagacagggtttcgccttgccacctagactggtcctgaagccctggcctcaagtgattctcctgcctgggtctcccacagcgctggggttacaaggtttgggctttcaaaggatcactctagctgtagggtggtgagtggctggtaggagatgaatataaagctgagggccaggcacagtggcgcacacctgtactcccagcactttgggaggccgaggtgcatgaatcacctgaggtcaggagttcaagaccagcctggtcaatatggtgaaaccccgtctctactaaaaatataaaaattagctgggcatgtccccagggtgtgtgcctatagtcccaactactctactcaggaggctgaagcaggagaattgcttgaacccgagaggcagaggttgcagtgagccaagattgtaccactgcactccagcttaggcaacacagtgagatcctgtctcaaaaaaaaaaaaaaatgctggggcgctgtgtgcttggatgatagggctgtggagacaggacatagtggacagaggcaagaggctttttggaggcaaaatcgacagggctttgtgatgaattgggtgtgcgtgttgggggagtaggagacagaggtattcaaggattctacacctctatctcagacgagcatactgaggctcagggtggggatggggggcagaaagctctgaacccaggatcacacagtcataatccagcatctcaactagagcttcgacctatgcctgtctgctgtgtaagctcaagctttcctcaaccccagacctctcttctctgcctgcacctcaccctcggaggtcattttcaggttcaaagacataaatagtatctaaattatttttgtatttttttgtagagacaaggaaggtcttgtcatgttgtccaggctgacctggaactcctggacccacacaatcttcccgcctctgtctcccaaagtgctgggactagaaaagtgagccactgtgccctgctggcatctaaattctgactcccacatgcccgtacccagccaggaacccctctgtaatttttttgttttaattttgagacagagcctcactttgtcacccagactggagtgctgtggtgtgatcttgcctcactgtaacccccatctcctgggttcaagcgattcccctgcctcagcctcccgagtagctaggattacaggcacctgcaaccacacccatctaatttttgtatttttagtagagatggggttttgccatgttggccaggctggtctcaaactcctgacctcaggtgatccgcccacctcggccttccaaagtgctgggattacaggcgtgagccactgtgctgggccccctcctgtaatcttgctgccggtatccagctgcctaagtgaactttccccgggatgtcttacaggcatttcaaaggcgaagtgaccaacccggagctcctggtcttaccccaaacctgagctcctggtcttaccccaaacctgctctcctgcagtctcccccatcccagtgcacagcaactccagcttccatcggttcaaaagtcctgcagtcaccccgacactgctctccctctcacctcacacatccagcccagcagcaaatctagccagctccaccttgaccctggaatctgcttcccaccccctcctctgacatcaccctggtccccatccccatcactgcccacctgggttactgcagcagcttcctcccggcctcctgcttccatcccaccccctcagtctagtctcaaccttaaagtcacagtgattgttaagacctaagtcagatattgttccttctctgctcaacagtctcttgtaactcccatctcactcacaggaaaggccaggagagtctgcactatgactcacagggtcctgctccatctgtccgcttccctctctgccttcacgtctcacctctcttcccattgcccacgtggctccagccacaccggcctccctgctgttccttgagcattccaggcaccgtcctgcctcaggacctttgcacaagctgctggttctgcctgaagggctcttcctccagatacgtatgtgcctcactttgtcatttcctccaaaactttgctcaaatgttatattctttttttttttttttgtaatagtctctccctgtctcccatgctgtagtgcaatggcgtgatctcggctcactgcaacctctgcctcccgggttaaagtgattctcctgccctaacctcccgagtagctgggattacatgtgtgtgctaccacgcccagctaatttttttgtgtttttagtagagacggggtttcaccacgttggccaggatggtcttgaacccttaatctcaggtgatcctcccgccttggcatcccaaagtgttgagattacaggcatgagccaccgagcctggccaaatgttatattcttattgaggtcttccctgacaaccccgtttaatgtaccagtgtcccctttctgctttccgtcttgtccctcacattctcaattctccttaacttgattttttttttttttttttggagatggagtctcactctgtcgccgaggctggagtgcagtggcctgatctcggctccctgcaacctccaacctcccaggttcaagtgattctcagcctcccgaatacctgggattacaggtgtgcaccaccatgcctggctaatttttgtatttttagtagagacagggtttcgccctgttgagcaggctggtctcgaactcctgacctcaggtgatctgcctgccttgacctcccaaagtgttggggttacaggcgtgagccactgcacccggccaaaaaatttttaattatttattttttatagagactgggtctcactatgttggccaccttggactggaactcctgacttcatccagtccttctgcttcagcctcacaaagtgctgtgattacaggcatgaccctccacacctggccccctccactttacttattatttttccataacacttggcaatcttctaaagcagtatatcatgaattaatttattatatgtattatacctgacatctcccactgggatgtaagttccacgagggcttgttttgttacatgagttatctctggtacttagagcaatattattgtgtccagtgagccgagatcgtgccattgcactgcagcctgggtgacacagcaagactgtgtctcaaaaaaaaaaaaaaaaagaaagaaagaaagaaaaaagaacagtattattgggtcataaaaagcattcaggctgtgctcaatgtctcacacttgtaatcccagcactctgggaggccaaggtgggaggatcacttgaagccaatagttgaagagtagcctgggcaacacagcaagaccccatctctacagaaaagaaaactaaggctaggcacagtggctcacacctgcaatcctagcattttggaggctgaggtgggtggatcatgaggtcaggagttggagaccagcctggccaaaatcataaaaccccgtctctactaaaaacacaaaaattagccaggcgtggtggcgtgtgcatgtagttccagctacttgggaggctgaggcgggagaattgcttgaacctggtaggtggaggttgcagtgagccgagatcaggccactgcactccagcctgggagacagagcaagactgcatctcaaaaaaaataaataaataaaaaaaattaaaaaaattagccaggcatggtggtaagtgcctgtagtcccagctactccaggaagctgaggtgggaggatctcttgagcctaggaagtggaggctgcagtgatctatgattgtaccattgcactccagcctgggtgacagaatgtgaccctgtctcaaaaagaataataataataatcattccataaaaagtatcaaatggagaaataaatcatcagtggggtctcggaggggaccaggggctgcagtgacaggcaacctggggccctgacacagggtcattcctgttccaggaagatgaatgcttccagatgcctgtctgaggaagtggggtccctccgccctctaaccatggctgtcctgtctgcctcctttgtcgtcggagtgctgggcaatgggctggtgccgtgggtgactgtcttccgcatggcccgcacagtctccaccgtctgcttcttccacctggcccttgccgatttcatgctctcactgtctctgcccatcctcgtgtactatattgtctccaggcagtggctccttggagagtgggcctgcaaactctacaccggttttgtgttcctcaccttctccaccagtaactgcctcctggtcctcatctctgtggaccgttgcatctctgtcctctaccccgtctgggccctgaaccaccgcactgagcagagggcgagctggctggccttcggggtgtggctcctggccgccgccttgtgctctgcgcacctgaaattccggacaaccagaaaatggaatggctgtatgcagtgctacttacagttcaacttggagaatgagactgcccagatgtggactcaggaggtctttgggagacaaatggcggtgatcatggcccacttcctgctgggcttcctggggcccttagcaatcataggcacctgcgcccacctcatccgggccaagctcttgcgggagggctgggtccatgccaaccggcccaagaggctgctgctggtgctggtgagcgctttatctgctggttcccatttaacgtgatgctgttggtccatctgtggcgacgggtgatgctcaaggaattctaccacccccagatgctgctcatcctccaggctagctttgccttgggctgtgtcaacaactgcctcaacccgttcctctacgtcttcgttggcagagatttccaagaaaagtttttccagtctttgacttctgccctggcgagggcgtttggagaggaggagtttctgtcatcccgtccccgtggcaacgccccccgggaatgatggaagacttcagctggaagctggaagccgtccttcttagtttgcttgtggcctcttaccttgactggcttctaaaaccctgccaaatcctgcctcttctttcaggaagtcttccggcaacccctcatctaaagctctgtggtagagacagctacttactccccagtgtccattcttccctttctttttatctttttccttttttattttttggagacagagtcttattttgtcacccaggctggagcgcagtggcacagtcttggctcactgcagccttgacctccagggctcaagccatcctcctgcctcagcacccccgccccccacccccaaatagctgggactacaggcatgtgccaccaagcctggctaatttgtagagatggggtttcatcattttgcccaggatggtctcaagctcctgagttcaaatgatcctccagccttggccccccaaaatgctgggattacaggtgtgagccacagcgcctggcctcccctttgcttgtagtaagactcctgtttgtttcaaacgaggcacatgcttaactagaaaagaaaaaaaagactacatttcccagaatcctttgcatgtcgtacagccatgtgactgcttctggccaataaaatgtaagtggcagcaatcaatgtaacttccttgaagagccattaaatggaagaggcctgtcctccatttccccatctccccctttctattgtccagaatgcaggcataccagttagctcttgttgcgcaacaaacaccatcaaagtttagaggcttaaaaacataaccattttttttatagtgtcttgttctgttgcccaggttggagtgcagtggtgtgatcatagctcaccaccacctcaatctcccaggctcaagtagtcctctcacttcagcctcctgagtagctgggattacaggcataccccactgtgcccagctaatttttttttttttttcttgagacggaatctcactttgttgcccaggctggagtgcagtggcgccatctcagctcactgcaagctccgcctcccgggttcacgccattctcctgcctcagcctcccgagtagctgggactacaggcgcccgccaccatgcccggctaattttttgcattttttttagtagagacggggtttcaccatgttagccaggatggtctgtatctcctgacctcgtgatctgcccgcctcagcctcccaaaatgctgggattacaggcgtgagccactgcgcccagcccacctggctaatttttttaaaaaagtttttgtagagatggagtcttgctatgttgcccaggctggtctcaaactcctggcctcaagcaatcctcctgcctcagcctcccaaagtgttgggattatagacgtgagccaccacacctggcttcataaccttttatgatttctgtggatcagcagtttgggctgggctcagctcagtagttttctcatcttgcgtctgggtttctttatgcatctgtgggtcacctaagtgattctgcttctgggagagtggctggcttggggtgatgggattggctaatccacatagctcttatcatcctgcaggctggctttttcgtttgatggttggggagggttccaagagtaaggaaagtatgaggcggaggctcagaactttgcacaaggtgactagcactcaagctactggtcaaaaagcaagtcacgagcctggcttagattcgaggtgtgaggaaaggactccaccccttgatgggaaaatctaaagagtgacattgctaaggagcacgtatgcaggaaggtgtgcagaacgggggccatttgtgtaatctgccacagcagccctgatgcaaagctaccgtgtacccagggagtccctaggccagccctgagatgcttacacccaggttgtgaaaggggaggtttcaaattccagctcattgaagccactgttattttgtgtctctcctgcaacagctgaatctaccccttaactattaattatgctgccaaactctggaacttgtgtaaagtgacttaataaatttccttattgttgaagccagttggagtcaggttttctgttacttaaaacccccccaaaaaaacaaactggtgcatgtgaagaatagtcctttctggggattgaagtcccagtggtccctggtcacaacaggccattcccttggctcttaagtcgaggcaaaagaaaaatgtcatgcaatccagaagctgtcacaccacttgctcatgattcaaagaagtaaatctgcccaggtggggtggctcatgcctgtaatttcatcactttgggaggctgaagtaggcggatcacttgaggtcaggagtttgagaccagtctggccaacatggtgaaaccccttctctatgaaacatacaaaaattagccagacgtggtggcaggcacctgtagtctcagctactccagagacagaggaaggagaatcgcttgaacctgggagacagacgttgcagtgagccaagagctcgtcactgtactgcaggttgggtgacagagactctttctcaaaaaaaaaaaaaaaaaaaaaaagcatctatgacttgccatgagaactccacctctcagagactcatttgcccccaaatctataaaataggaacaaatgtttccatcttctggatgaggagaggattaaatgacacagtgactgagtgccaggaagcacagagtcaccttaaaaaaaattaactcctgggccgggcagggtgactcaagcctgtaatcccagcactttgggaggccaaggtgggcggatcacctgaggtcgggagttcgagaccagcctgaccaatatggagaaaccccatctctactaaaaatacaaaattagccgggcgtggtggcacatgcctgtaatcccagctactcgggaggctgaggcaggagaattgcttgaacccaggaggcggaggttgcagtgaggcgaggtcgcaccattgctctccagcctgggtgacagagcaagactccgactcaaaaaagaaaaataaaaagaaaattaaaaaagcattggattgtattttttaggcggtgtcttgtctttctggtgacacctgttgacatgatgtgtcttagagtcagtgaaatgttacccgtgaggccacagtattctcctgaggaaataaagccatgcacagcataacgaggtttctgtcaatgacagactgcacgtccgacagcggccccaccgattataatggagctgaaagactgcagttgcccggtgatgttgtagctgtcctaatggagtagctcaaggcgttactctaatgtttgtgctgatgctggtgtacacagacctacttgaccgccagtcgtataaaagcatagcacatacaactgtgtacagtacgtcatactagtccatggcaacaggcaggacatggtggctcacagttataatcccagcactttgggaggccgaggagggtggatcatgaggtcaggagatcgagaccatcctggctaacacggtgaaaccccatctttactaaaaattacaaaaaattagccgggcatggtggcgggcgcctgtagtctcagctactccggaggctgaggcaggagaatagcatgaatccgggaggcggagcttgcagtgagccaagatcgcgccactgcactccagcctgggtgacagagcgagactccatctcaaaaacaaaaagtaataataataataatgagagcagtattaacaatagagagctaacaatgcctgagcgcctactatgtgccaagaagttttttttgttttgttctgtgtttgctttgtttttgtttttgattattctcactgtcgcccaggctggagtgcggtagctcaatctcgactcgctgcaacctccgcttctcagatttaagcgattctcctgcctcagcctcccaagtagctgggattacaggcacccaccctgatgtctggctaatttttgtatttttagtagagacagggtttcgccatgttggccaggctggtcttgaactccttgtctcaggtaatccacccgccttggcctcccaaagtgctgggatcacaggcgtgagccaccgagcccggccgcaagaagttttaagtgttttgtatctcttaacaaatttcattagcacaaggagggcagaggagaattggaatggccttgcggaaagacctccctgtcacccgcctcctccttatgccccaagcctgcagcccctggggcctattattagggcccacatctggtgacatttcccggactgatagcgatctctgaagctcttgctcaaggttctttcctggacatttatctgctccaaaactcacagctagcttcctgccatcagccccctacctttaacgtgggctcaaggctggcggttgcctgggactgacgacggagcagagaaagccccctcatcttgctttcatcctcggacacagcacaaggtgacaggggactgggatttgttgggaggatctcagggagccaggaggtaggagcttggggactaagagagttgaagggcactttccagggtatacaaaaaggagctggcgggctgggtgcggccgctcatccctgaaatcccagcagtttgggaggctgaggcaggtggatcacctgaggtcaagagttggagaccagcctggccaacatggtgaaaccccgtctttactaaaaatacaaaaattagctgggtatggtggcaggtgcctgtactctcaattactcaggaggctgaggcaggagaatcgcttgaacctgggaggcggaggttgcagtgagctgagattgtgccactgcactccagcctaggcaatagagtgagactctgtctcaaaacaaaacaaaacaaaacaaaaagaggtggcaaaaaggggctgaaagttctgggccacctcctctgggtgaggaatgttctcatgccatatgcgtgaactgtgcctgatcagaggtatttgactgtcttcatcactgcggtatccccagcgcttaggatagtgtatggcgtacgatttgggctcaatgcataattttacactaaatgaatgaatccatcctcagatgacaaaggagagattgtcctccttaatgatcactcatccattatttaccaagtgcctgctgtgttccaggggccaggagcaagccacacaccagcctcgcctctagggaacccagagatgaataatgcagatgggtgatcaccaaatgaccaaacaaacggtctaattgctgctgcctgtaactagctctttttttttttttttttttggttgaggggagatcagagtcttgctctgtcacccaggctggagtgcagtggcacgatcatggctcactccaacctctgcctcccgggttcaagcaatatctcctgcctcagcctcccaagtagctgggattacaggcgtgtgccaccttacccggctaatttttgtatttttagtagagacaggatttcaccatgttggccaggctggtcttgaactcctgacctcaggcgatcctcccacctcagcctcccaaagtcctgggattacaggcgtgacccaccatgcccagcctgtaaccatgtcttcataggagagaaggtcctataggagggcctgattcatcaaggtggctgggaaaagctttggggagaaagtgaaatttgcactgagatctcaggaaggagttaaaaaaaaaaaaaaagcagaggaaagaaagggtgctccaggcagaggggcagcacatgcaaaggccctgggtgggagggagacgagaatcttggcaatggacacaaaggtagggaagccgggatttggtgcacaaagagggggaaggtgcaagagaagtctggagaggccagcaggtgccccagccctcaccagcggtgtcggggagactcatatttatcccacaagcaatgaagagccacagtgtaattttccagtttgaactgtatttttttttttttgagacagggtctcactctgttgcccaggctggagtgcagtggcacagtcatggctcactgcagcctcgacctcctgagctcaagtgatcctcatgcctcagcctcctgggtagctggaactacaatgcaagccaccctgtttagctaatttatttttattttgtagagacagggtttcgccttgccgcctagactggtcttgaagccctggcctcaagtaattctcctgcttgggtctcccacagcgctggggttacaaggtttgggctttcaaagcatcactctggctgtagggtggtgagtggctggtaggagataaatataaagctggagtccaggcacggtggctcacgcctgtactccccacactttgggaggccgaggtgcgtgaatcacccgaggtcaggagttcaagaccagcctggccaacatggtgaaaccccgtcgctactaaaaatacaaaaaatagccaggcgtgtccctggggtgcgtctcaactatactacttaggaggctgaggcaggagaattgcttgaatccgagaggcagaggttgcagtgaaccaagattgtaccactgcactccagctcgggcaacagagcgagatcctgtctcaaaaaaaaaaaaaaaaaaaagctggggccctgtgtgcttgggtgatagggctatggagacaggacatagtggacagaggcaagaggctttttggaggcaaaattgacagggctttttgatgaattgggtgtgcgtgttgagggagtaggagagagaggtattcaaggattctacacccctatctcagatgagcatagtgaggctcggggtgcaggggaagccctgagcccaagatcacacagtcataatccagtgtctcaactagagcttcgacttatgcctgtctgctgtgtaagctcaagctttcctcaaccccagacctctcttctctgtctgcacctcacccttggaggacattctcaggctcaaagacgtaaatagcatctaaatgttttttgtttttttttttgtagaggcaaggtcatgttgtgttgcccaggctcacgcaatcttcctgcctctgcctcccaaagtgctgggactacagaggtgagccactgtgcccggctggcatctaaattctaacgacttcgacatgcccgtatccagccagaaacccctctgtaatttttttttttttgagtcttactccgtgacctaggctggagggcagtggcgccatcttgcctcattgcaacctccatctcctgggttcaacgaattctcctgcctcagcctcccgagtagctgggattacagccacgtgccaccacacccagctaatttttgtatttttagtagagacggggttttgccatgttggccaggctggtctcaaactcctgacctcaggtgatccacccgcctcggccttccaataagtgctgggattacaggcgtgagccaccatgccgggtcccctcctgtaatcttgctgctggtatccagctgccttagtgaagtttccccgggatgccttacaggcatttcaaaggcgaagtgaccaaccccgagctcctggtcttaccccaaacctgctctcctgccgtctcccctatcccagtgcacagcaactccagcttccatcggttcaaaagtcctgcagtcaccccgacactgctctccctctcacctcacacatccagcccagcagcaaatctagccagctccaccttgaccctggaatctgcttcccaccccctcctctgacatcaccctggtccccatccccatcactgcccacctgggttactgcagcagcttcctcccggcctcctgcttccatcccaccccctcagtctagtctcaaccttaaagtcacagtgattgttaagacctaagtcagatattgttccttctctgctcaacagtctcttgtaactcccatctcactcacaggaaaggccaggagagtctgcactatgactcacagggtcctgctccatctgcccgcttccctctctgccttcacctcttacctctcttcccattgcccacgtggctccagccacaccggcctccctgctgttccttgagcattccaggcaccgtcctgcctcaggactttgcacaagctgctggttctgcctgaagggctcttcctccagatacgtatgtgcctcactactttgttatctcctccaaatctttgctcaaatgttatattctttttttttttttttgacatggagtctcaccctgttgcctaggctcgagtgcaatggtgtgatctcggctcactgcaacctctgcctcccaggttcaagtgattctcctgccccagccctctgagtagctgggattacaggtgggagcctccacgcccagctaattctttgtatctttagtagagacggggtttcaccatgttggccaggctggtctcgaactcctgacctcgtgatccgcacctctcagcctcccaaagtgctgggattacaggcatgagccactgagcatggacaaatgttacattcttatcggggtcttccctgaccaccctgtttaatgtaccagtggcccctttctgtctcatccttcacattcccagttgtccttatcttgattttttttttttttttttttttttggtgacagagactcactctgtcacccaggctggagtgcagtggcctgatctcggctcaccacaacctccagcttcccagattcaagcgattctcctgcctcagcctcccaaatgcctgcgatcacaggtgtgtgccaccgcacctggctaatttttttatttttattagtgacggggttttgccttgttggccaggctggtctcgaactcctgacttcaagtgatctgctcacctcggcctcccagtgtgctgggattacggatgtgaaccactgcgcttggccttaccttgatctttttctaaagaaaacatttcatgatcttcatttcttcctgtcaatatgtgtcaccatgtgatattaactcctttcagcctagaggacttacttccttaagcaattcctgcggtctgtaggccatatattatttcagatctggcttatctgaaaatgcccttttttcactttcatttttgaaagatattttcacagaatataaaattctggattgacagacttttctgctgccaattttttcaaatagtggagtaatttttaatattttgtccagattttaattttttttttgtctgtggcaccatttgtctgacaaagttactctgacattatccaaagttaaaagaacctccatctcattatttttactttatttttattgagacagggtctcgctttatcacccaggctgaagtgaaatggcgtgaccatggctcattgcagcctcgaattccagggctcaagtgaccctcgtgtctcagtctcccaatttgctgggactacaggcacgtgccaccatacctgactaattttttttttttttttttttgagacagagtcttgctctgttgcctgggctggaatgaagtggcacgatcttggctcactgcagcccctgcctcccaggttcaagggactctcctgcctcagccttcagagtagctgggattacaggcacgcaccaccaagcctggctaatttttgtatttttagtagagacaggcttttgccatgttggccaggctggtctcgaactcctgaacttaagtgatccaccagcctcagcctcccaaagtgctgggattacaggaatgagccactacgcccatctcacggctaatttttaaattttattttatttttatttttttgagacggagtttcgctctcgttacccaggctggagtgcagtggcgcgatcttgattcactgcaacctccgcctcccaagtttaagtgattcttcagcctcatgagtagctgggattacaggtggctgccaccacacccagctaatgttttttgtatttttagtagagacggggtttcgccatgctgggcaggctgatctcgaactcctgacctcaggtgatccgcctacctcagcctcccaaagtgctgggattacaggcgtgagccactgtgcatggccacaaaaacttgtaattatttattttttgtagagacggtctcactatgttgcccaccttggtttggaactcctggcttcaagcaatccttctgcctcagcctcccaaagtgttgtgattacaagcatgagccaccacacctggcccctccatttcatttattatttttccataacacttgtagtcttctaaagcagtatatcatgaagtaaatttattatatgtattacacctgacatctctcactgggatgtaagttccatgagggcttgttttgttacacgagttatgtccagtacttagaacaatattatagtgtccagtgagccgagatcgtgccattgcactgcagcctgggtgacataaggagactctgtctcaaaaaaaaaaaaaaaaaaagaacaatattattgtgtcataaaaagcattcaggctgggctcaatggctcacacttgtaatcccagcactttgggaggctgaggtgggaggatcacttgaagccaggagttcaagaccagcctgggcaacacagcaaaaccccatctctacaaaaaagaatttaaggcctggcagagtggctcacacctataatcccagcactttgggaggctggtggacgggtcacgaggtcagtagttcaagaccagcctggccaacatggtaaaaccctgtctctactaaaaacagaaaaattagccaggtgtggtggcatgtgcctgtagttccagctacttgggaggctgaggcaggaaaattgcttgaaccttggaggtggaggttgcagtgagccgagatcataccattgcactacagcctgggtgacagagagagcaagactctgtgtcaaaaaaaaaaaaaaaaaaaaaaggtaaaaaaattagccaggcatggtggtaagtgcctgtagtcccagctactccaggaggctgaggggggaggatctcttgagcctaggaggtggaggctgcagtgatctgtgattgtacctttgcactccagcctgggtgacagagcatgacgctgtctctaaaagaataataataataagcattccataaaaattatggaatggagaaatcatgaatggggtctcggaggggaccagaggctgcagtgacaggcaacctggggtcctgacacgtgatcgctcttgttccaggaagatgaactcttccggatgcctgtctgaggaggtggggtccctccgcccactgactgtggttatcctgtctgcgtccattgtcgtcggagtgctgggcaatgggctggtgctgtggatgactgtcttccgtatggcacgcacggtctccaccgtctgcttcttccacctggcccttgccgatttcatgctctcactgtctctgcccattgccatgtactatattgtctccaggcagtggctcctcggagagtgggcctgcaaactctacatcacctttgtgttcctcagctactttgccagtaactgcctccttgtcttcatctctgtggaccgttgcatctctgtcctctaccccgtctgggccctgaaccaccgcactgtgcagcgggcgagctggctggcctttggggtgtggctcctggccgccgccttgtgctctgcgcacctgaaattccggacaaccagaaaatggaatggctgtacgcactgctacttggcgttcaactctgacaatgagactgcccagatttggattgaaggggtcgtggagggacacattatagggaccattggccacttcctgctgggcttcctggggcccttagcaatcataggcacctgcgcccacctcatccgggccaagctcttgcgggagggctgggtccatgccaaccggcccaagaggctgctgctggtgctggtgagcgctttctttatcttctggtccccgtttaacgtggtgctgttggtccatctgtggcgacgggtgatgctcaaggaaatctaccacccccggatgctgctcatcctccaggctagctttgccttgggctgtgtcaacagcagcctcaaccccttcctctacgtcttcgttggcagagatttccaagaaaagtttttccagtctttgacttctgccctggcgagggcgtttggagaggaggagtttctgtcatcctgtccccgtggcaacgccccccgggaatgatggaagacttcagctggaagctggaagccgtccttcttagtttgcttgtggcctcttaccttgactggcttctaaaaccctgccaaatcctgcctcttctttcaggaagtcttccagcaacccctcatctaaagctctgtggtagagacagctacttactccccagtgtccattcttccccgcccccccccccttttttttttgagatagagtcttgctctgtcaccaggctggactgcagtggcgcgatctcggctcactgcaacctctgactttctggttcaagcaattctgcctcagcctcccgagtagctgggattacaggcacgtgccaccacgcccagataatttttgtatattttttagtagagacggggtttaaccacgttggccaggatggtctcaatctcctgaccttgtgatccgcctgcctcggcctcccaaagggctaggattacaggcgtgagccactgcacctggcccattctttccctctctttttcttttttttaaaaattttttaaagacagggtctgattttgtcacccaggctggagcgcagtggcaaaatctcggctcactgcagccttgaccttcagggctcaagccattctcctgcctcaggactccccacgccccaccccccacctcccctcaccctgcctagtacctgggactataggcatgtgctacctgggtaatttgtagacacggggtttcatcatgttgcccagagtggtctcaaactcctgagttcaagtgatcctccagcctcggctcccaaaactactgggattacaggtgtgagccacagcacctggcctccccttttttggtagtaaaactcctgtgttctaatgaggcacggtgcttaactagaaaaaaggaaagactacatttcccagtatcctttgcatgtaggtacaaccatgtgactgctttctgaccaataggatgtaagaggcagcaatcaatgtaacttccttcaagggccccttaaatggaaggggtctgccctccatttccccatttccccctttctattgtccggaatgcagatgtatcagttaccttttgctgtgtaacaaaaaccttccatgtttagaggcttaaaaatataagttttttttttttttctgatagggtcttgctctgttgctcaggctggagtgcagtggtgtgatcacaactcactgccacctcaatctcccaggctcaagtggtcctctcacctcagcctcctgagtagctggcatgtgccaccccatgccaggctaattttgtattttcagtagagatggggtttctccatgttggccaggccggtctcaaaatcctgaccttgaatgatctgcccgcttcagcctcccaaagtgctggaattacaggcatgagccaccacacctgggcagaactacttctttgaatcatgagcaagtggtgtgacagcttctggattgcatgacatttttcttttgcctcgacctagagccaagggaatggcctgttgtgaccagggaccactgggacttcaatccccagaaaggactattctttacatgcatcagtttggttttggggtgttttaagtaacagaaaacctgactccaactggcttcaacaataaggaaatttatcaagtcacttcacacaagttccagaggttggcagcataattaatagttaaggggtagattcagctgttgcaggagagacacaaaataacagtggcttcaatgagctgggatttgaaacctcccctttcacaacctgggtgtaagcatctcagggctggcctagggactcccgggggacacggtagctttgcatcagggctgctgtggcagattacacaaatggcccccgttctgcataccttcctgcatgcgtgctccttagcaatgtcactctttagattttcccatcaaggggtggagtcctttcctcacaccttgaatctaagccaggctcgtgacttgctttttgaccagtagcttgagtgctagtcaccttgtgcagagttctgagcctccccctcatactttccttactcttggaaccctccccaaccatcacacgaaaaagccagcctgcaggatgataagagctatgtctctagtaaacatacaaaaattagccgggcatggtggcagacacctgtaatcccagctacttgggagactgaggcaggagaatcgcttgaacctgggagacagaggttgcagtgaggcaagatctcatcactgcactccaggctgtgtgactgagactctgtctcaaaaaaaaaaaaaaaaagaaagaaagaaaaagaaaataaaagaaatgtaaaagaaaaaaaaaaaaagcagcagctctgacttgccctgagaactccacctctcagagcctcggttgccccaagtctataaaatagaagcaagtgtttccatcttctggatgaggagattaaatgacacagtgactgagtgccaggaaacacagacgcaccttaaaaaaattaactcctgtgggaggctgagcggggaggattgcttgagcccaggaattcgagaccagcctgggcaacatgatgacaccccatctgtacaagagattggcatggtgacgcatgcctgtagtactggctacgtgggagtctgagataggaggatcacttaagcctgggctgtggaggttgcaatgagctgagatcgtgccactgcactccagcctgggtgacacagtgagtctctctctctaactctctctctctctctctgtcacacacacacacacacacagaaagagagagagagagagagagagagagagacctacctattctgttgactagtggatctgattaaaaataaataaactggggaaagtattatttaaaaaaaaaaacttgaaagtgatgagaaatagtcctccctttcattccaaatcctccattgttactttttctcacgagaaaactgttaccagttttttgtgtatccaacccatgcataagcactttctttctttctttttttttttttttttttttgagacagagtctttctctgttgcctaggctggagtgcagcagtgagatctcggctcaccgcagcctccgcctcccggggttcaagtgattctcctgcctcagcctcccgagtagctgggattacagacacccaccatcatgtccagctaacttttgtatttttgtagagacagggtttcaccatgttgaccaggctggtcttgaactcctgacctcaggtggtctgcccgccttggcttcccaaagtgcctgggattataggcgtgagccaccgctcccagtgcataagcactttcaacacaaatagagcatgccatagctatgattctacatcgtgagtattttccaaagagtatacctttgggacggcaatacataagatatctagcacatgacttttcaatggtggtggctaagtattcccttatatgtatatactgtgcacggaagtagtgttccctaatcccctactgatgagttgctttgaatttgatgcaatgatatttttgaaactttgaaaattattcaataaaacacacattctgaacaatacataaagaaaatagaatggggggaatttgtttgatttatcactaagtgaacaaccaggcaacccagccataaaacaatgtggccaccccagggctcccctcccacctcctcgccctctcagtcagtcctccatctcctttaaagataacttttgttttgttttgttttgttttgttttctgagatggagtctccctctgtcattcaggcaggagtgtagtggtgcgatctcagctcactgcaacctccgcctcccgggttcaagtgattctcctgcctcagcctccctagtagctgggattacaggcatgtgccacctcatctggctaattttttttttttttgtatttttagtagagatggggtttctctatgctggccaggctggtctcaaactcttggcctcaggtgatccacccgcctcggcctcccaaagtgctgggattacaggcgtgagtctccccaccctggccaatatatttcaattaaatatatcaatgctgatatttgtccatcctcacattttgtcggtctctctctccatctgtccacgcactgtagtacctccagtatgatgagcagacaagacggggacatgaggtctgggaaacccagggagggagccctcagcatacccactgtgctgcaaggggcacaatgctcagaggtacctcccaaaaatgttgaactgtgttaaagtcggcgcaggtaggacgtcacgatattttacctattaattcttcagcctgtatcttctaagaacaagagcattttccctgtaaaattataatattattatctccctcaagaactttaccattggtattatctaataaacaggccatattcaaatttcctaactgttccaataataaactttagagcaatttttttttttgagtcaggttcttgctttgttgaccaggcgggagtagagtggcatggtcatagctccctgcagcctcgagcaatcctcctgcctcagcctcccaagtagctgggacgacaggcatgtgccatcatgccctcattaaatttttttttgtagagacagaatcttgctatgttgcccaggctggtcttgaattcctggcctcaagcaatctttctgcttcagcctcccgaagtgttgagattacatgtgtgagccgctgcccttggcatggagcattttttaaaaagcaggatcctgcaatgatattctctgcctctccttgaaaaaaaaaaaaaaaaaaaagactatgcattaggtcacaaataaaacataggttgattccccaaagcagaggtaatacaggccatattcaaatttagaaattaataacaaaagatgaaaaaaatgcttcaattgccttggacattgcaaaacacccttctaaataacatcttggttcaactgttaattaaaacttaagttctacttcatttaaagcacactacatataaaaacttacggccaggcgcggtggctcatacctgtaatcccagcactttgggaggctgaggcaggcagatcacctctggtcaggagttcgagaccagcctggccaacatggtgaaaccccatctccactaaaaatacaaaaattagccaggtgtggtggtgcatgcctgtagtcccagctactcaggaggctgaggaaggacaatcacttgaaccctggaggtagaggttgcagtgagctgagattgtgccactgcactccagcctgggtgacagagcaagactctgtctcaaaaataaataaataaataaatatttttaaaaaatcttatgagatggggccaaagctgtgctcagaggaaaatctatagcttatttatttgttttgttgttgttgttgttgtttatttgagacagggtctcactctgtcacccagactggagtatggtggcaccattgctcactgtagcctcaacctcccaggctcaagtgatcctcccacctcagcctccccagtatctccaccatgcccagctatttgtttaattaattaattaattaattaatttattggtagagatggggtcttgctatgttaccaaggctgatctcaaatacctgagctcaagccatcgtcctgccttggcctcccaaagtgttgaaattacaggcgtgagccactgcactcagcctttaatttaattgtaattagaagagagagagagagagagagagagagacagagagagagaaagtccgagaggaaattagcaaagcaaacaattcaggaagaaaaaaaagctataaaatagtgcactgaaagttgaaagaaagcgttcatagagattagagggagttaattttaagtaaaaaattatggacaatagtaagaagctggttctttggaaggagaaatactcttttccatgttctgtctctctctcatgtgtgcacacaggtacacacacacaaaaccaacaataatattcttttacgtttgtgtttgtgtacttttgtgaatgcttcaagaaggcagaagagcacaatgggacacaagttgcttccactctctgtgcctcagtttccaccaatgtaaaatggggataatggcagtagctccctgagagggtccctgtgaggatgacttgcgttgccgtgggtggggcgcttggctccgtgcctggcaccgaggaggtgcgatgtgtttgctgtgatcagtatcatcctctgttgcataaattcctcctggggaactgccgggttagagggagtgttcgatgtcgcagacgccgccgcgagcgctctgcaagcctgtttcccacggcttcgccaacgcagcaaccgccaagtcagcctctttgatctttgccttctcagaggagaaaagtgggatcccggggaggtttttaatttgcattgattttctaatgaatgcggttcagcattcttccaaggaggctctgcggtttttagagctggctgcaggatcctccctggggagacgtggtctttgctggggcagagccaggcgcggtggtggaggtgggtttgagtctcggggagcgcgcgggagctgggcacggccccgtgcttgagaggatctggcattttcctgggcagcctcggcgagagagagtcgtggaaggtgagttaagcctccggattatactctgccaagcagggactaaaaattcgtatccaacagaattgctaagacagctgaagactgcgattcacgccttcatcccttaaataatgacagctcacaggtattgatcgtgacctaagtaccaggccctgtccagagctttctaaacatgtgaactcccaaagtcagcatcacaaccctgagggcggtgctgcgattattcccgttgtacagaggaggaaactcgaggctcagagaggtaaagtcatttaccgaaggtcacacagctggctgggtacggtggctcacgcctgtaatcccagcactttggaaggctgaggggggcggatcacctgaggtcaggagttcgagaccagcctggccaaagatgaaacccccgtctctgctaaaaatacaaacattagccgggtgtagtggtgcatgcctgtaacgccagctactctggaggctgaggcacgagaattgcttgaacccgggaggctgaggctgcagtgagtcgagatcgtgccactgcactccagcctgggcgacagagtgagactccgtcttaaaaaaaaaaaagaagaaagtcacaaagcaagtaagtgtaggatgggaatttgaccggtctgactccattaacccatccagttatgtttaccgagcgcctgtctggtgaaggtcactgtttttggtgtgggagaaaggcaaagaagacaaagatacctacctttgaaggactagcattctagggagtagcactgacatgccgggggcagtggctaacatttaagggcgaggggctagcatttagggggagtggataactttaggaggcggggctaaaattccaaagggagaaactgatcttccagggaaagaaattgacattcagaggggagggactaacatcccagggggaggagctaatattccagggaggaggagctaacatttcaggaggaggggctaatatttttagtacaattatacactgttaatcactacctctgtttctaacattttagggtaattgcatgctcttaatcactacctctgattctctcaggcaataaaggaggggccaacctttatgagggagggggtaatatgccaaggggaggaactgacaatccatgggaagaaatggacattctagggggaggagctaacaacgaggaggggctaacatcgcaggagaaaaattgacatttaagaggggagaagctaacatcgcaggagagaaattgacatttcagaagggaggagctaacatcataggaaagaaattgacatttcagggggaggagctaacattgcaggggagaaattgacatacaggaggaggggctaacattcaaataagggtgctaacattcagtgggagaggctaacattgcaggggagaaactgacatttcagggcagggctgacactctccatccttcagattctacagcctctgcctccttgctataccctgtccctacaagtattggctgagctcatagtaggtgcaaatctctgccaccctggggatttgaacatgcctgaatagaatggagtctgccctcatagagctcgcagcctgggggcagacagttctgaacggaatgattacacagaaagacattcacctcccaggcaggagaggtaatcacgcgctcttaatcactacctccgtttctctcaggcaatacgggaggggaggcggcacccccatcgtggcctggtttgagatgttcccagccgtaggagacagactgtcatcaagtgtcggaaaatagctgtcatgggaatcctcacctcctgacaccttcccagccccgtgctcccgaaaccctccccgcgtggctgcagagttgtaggttctgctcctggtgacgggcaaccccgtaatctccaatgctcacggcagctctgctggggcacagcagctcctgggggccaaggtcccagccaggacgtggatgtcagggccgagactggaatgtagaaccgtgggagtccagagcccaggtccttccccacgaaccaccagatgtggtgtgggtttcctggtttccgttcttgttcaagtggaataaaaggaaaaggtgggggagtgacagccacacctaatgtccccccaccatggtgggggatttttgtctgttccctttgctgccgtgtcccccgtgcctgggatgcgcccagtgctgaacgatgcccctttgcacatatacagtctcacgctgattgatctgggtttactaagtgtcagtgattcactcccttgaaaatgggagccccattttcaatgtgtgactcccattgtgatcgtaggttctggggacccacagaggacaggcccagaccctgatctcaaaaacgcctcagaggccaggtgcggtggcttacgcctgtaatcccagcactttgggaggccgaggtgggtggatcacttgaggtcaggagttcaagaccagcctggccaacatggtgaaaccccatctctacttgtgtgcaaacagagcttgctggtcctcgcacatgggacagaatgagggacaggagcaggccaccggcttttctggtttctgaaggagtctgttgtgaaatatgcaagtgccttccgaccatgcgcaccaggccctctgccctggggaacaatgtgcttcacgttccttcattttcaagctcctgaatgtttccaaactaaaatgtaaatttggccccatgttttgagtctttgatgtatccacggagctccctctgaaatgcactcagctccaagaggaggaaaatcgacctctgtcttctgggaacgcattacagcgagggctcttgaccctggctgcacagcagaatctctagggagagcttttaaaataaaatcgatgcccgggccccatccccagaccttgtggtttaagtggtccagggtggagctcggctctgggaatttcaagacctccccagggatttctgcgggcagctgggctgagacccatctctctgtggttgtgaaaatacaacctcgggccaggcatggttgctcacgcctataatcccagcactttgggaggctgaggcaggcagatcacttgaggtcaggagtttgagaccagcctggccaacatggtgaaaccccgtctctactagaaatacaaaagaaaaaagaaatgcgagcatggtggctcaagcctgtaatcccagcacttcgggaggccaaagcaggtggatcacctgaattaaggagatcgagaccagtctggccaacatggcgaaaccccgtctctactaaaaatacgaaaattagccgagtgtggtggtgcacacctgtaatcccagctacttgggaggctgaggcaggagaatcgcttgaacccaggaggtgaaagaaagttgcagtgatccaagatcttgtaactgcactccagcctgggtgacaaagcaagattccatttccaaaaaaaaaaaaaaaaaaaaaaagagaaaaagaaataccaaaaaaattacccaggtgtgatggcacctgtaatcccagctactcaggaggctgagacagaagaatcgcttgaacccggaaggtggaggttgcagtgagctgagatcgcgccactgcaccccagcctgggcgacagagcgagatttcgtcttaaaaacaaaaaaaagaaaaagaaaaagaaaatccaaccttgatagctcccagaggactgagaaaggcagcactgagtggttcaaaccctggggtgcggatgggaaactggggtgaaaatgcaaagaccagctttgttgtcaatattcgttagtggtggtgggggtgctgtggctcatgcctgtaatcccaacactttgggagaccatggtgggaggattgtttgagaccaggagttcaagaccagcctgggcaacataaaaagacctcatctctactaaaaaaaaaaaaaaaaaaaaaattgccaggcatagtggcgtgcacctgtggtcccagctgctaggaaggctgaggtgggaggatcccttgaacccaggaggtagaggctgctgtgagccacgatcacgccactgcactccagtctgtgtgacagagtgagaccctgtctcaaaaaaaaaaaaaaaaaaaaagaaaactgtgaactgttgcacaaatgtaaggtttgatgttatcttcttccatgtactgtcaactccttaagggtgggaatggtgtcttttttttttgctccctccatggcaccccccacccccatcctgcgctcaacacaggactgggtgtagagatgacctcataaaacacactgcacggtaacttgcatggtggcttagcaaacaagaggtgcttaataaatggtagctaacgacaatgaaaaaaagtgtttcccaaacgttgacagccaagccccaactgtgggttcagcaggggtcagatgctgttcagagcgaccccaccctgaagctccctgtcacagccgggaataaggggaggcaaagttggggcagcagacaggagagtctgactttgcttagcgttcaaggaagcctcaggggagaggtagggaagtgacacaaaacagacatgggaggctgggcgcagtggctcctgcctataatcccagcactttgggaggccaaggcgggcggatcacctgaggtcaggagttcgagaccagcctggtcaacatggtgaaaccctgtctttaccaaaaatacaaaaatcagctgggcatggtggtgggcacctgtaatcccagctactcgggaggctgaggcaggagaatcgcttgaacctgggagacggaggttgcagtgagccgagattgcgccactgcactccagcctgggcgaaagagcgaaactccgtctcaaacaaacaaagacatgggaaagggcattccaggctgggacccagcagtgcaaacgcgtggtgctgcatttgggactatcttcgagttcgccgtggccaagaatacaccagggtgggcatgggaggtgggtgagattttttttttttttttaagcctggagggggtcaggttacatgcagcctccaatgctcagtggagggcctgggattcttatcttgggtgggggcacagggccactggagggctgtgaggagaaagggacagggtcagctctgggtcccggaggacccctctgaggactggaggagagagagagaaggctggggtgagggtccagtgggggaggaagcccaggcagggaggagggaggaagtggccaggaccccccgccccccggtctcaaaaaattgtggttttgagtgagactctgtctcaaaaacagacagacagacagacaaacaaacaaacagttgtggttttgccaaaaccaaagttatttcttgcgctcaacccttaaggcaaccaatttctggctgagaaaatagtgcaacaccgccactatgtggttatttggagttttgcagccaagaatttgaaagtaaagccagcctccaaatcgggaagcttttgagaacttcaggagggcactattgccactgacgctaaaacattagcctaaaatgttggtgatccacaaaacttctattaattcgagataaaattatagtgcaactatgaatgtttattactgaaatttggggccaagcgcggtggctcacacctgtaatcccagcactttgagaggccgaggcgggcagatcactaagttaggagttcaagaccagcctggccaacataatgaaaccctgtctctacaaaaaatgcaaaacttagccaggcgtggtggcgggtgcctatagtcccagctacttgggaggctgaggtaggataattgcttgaacctgggaggtggaggttgcagtgggccgagatcgcgctagtgcactccagcctgagtttaacagagcgagactccatctcaaataaaatacaataaaataaaaagaaattggtgaggccgggcacagtggctcatgcctgtaatcccagtactttgggaggctggggcaggtggatcacctgacgttgggagttcgagaccagcctgaccaacatggagaaaccccatctctactaaaaatacaaaattagccaggcgtggtggcgcatgcctgtaatcccagctactcgggaggctgaggcaggaaaattgcttgaacccaggaggtggaggttgcagtgagctgagattgcactgttgcactccagcctgggcaacaagagcaaaactctgggaagaaggaaggaaggaaggaaggaaggaaggaaggaaggaagggagggatggaaggaaatttgttgggctttttcaggaaaacctagcacgtgcagtcaaccctactccaaagctggcttttcagatattgagctgaaatgaaattgcttttgactagatgagaaggtaggtgaaatgcaattgaaggtggaagtgtcccccagggcattgacctgaggatgctggaggtagaggcagggggtgggggaagggcgctaagcaagggggctgctagcgaactgcctgtgggggcgggtctgcacatttttataggaagggacattgctggtgggtgttgaaggttaaataggagtttgttaagaaaagaggctgagcacagtggctcacacctgtaattccaacactttgggaggctgaggtaggaggattgcttgaggccaggagttagagaccagcttgggtgacatagtgagaccctgtctctaaaaaaaattaaaaagttagctgggcatggtggtgaacacctacagtcccagctactcaggaggctgaggcaggaggactgcttgagcctgggagttcagggttgcagtgagctatgatcataccactgcactctagcctgggcaatagagtgagatctcatctcaaaaagaaaagaaaaaagaggaagatgtgttgatacagtatgacagtgatgaagatgatgacgataactacagacccactgcagctgacaaagtgcattcacattttggatctctggctgccctggctgtggttttttggggcccattggacaaagattttcgcctttgtctgatggagaagaaatcacgggatcaagggaaataacaaatccgaagtacacagcagcctgtgttggtgccgggtgctcaatgtgccctgcttgttcttccctctgtgcccttacaccaggttgaaatgttcttcctcttcttggaatttccccacagactcctactcatccctgaaaacccagcgcagattcccagctcctagcctcaaacctgcgagggtgggtcctcaccactctcctacctcagaccctggagtccggacccccaccccactcccttctgaaacacagagccccaggtgtggtgtaggcccgaggccgggcgcaagggcagtgggtcggcggagcaggatgtgcggattcagttacatttatctggcctcagagcgatggcagagggagaggcagggctcttgtgcggggaggtcctgtgtcttctcactgctgagcctgagagaggaaaacagggacatatacagagatgtgggagagaaagagagaccaagatgacagaactggaccagggagacagagactcagcccccacctccgctcttctcccgctcaccttgttgaagaaatagatggaggtcaggatggtgaacaaggccatggccagggtcacattctgggggggagatcagaggtcaggacccttcccctccctgccctctgcccagccccaggcctcccttccctgccagacccctcctcacttcctgaaagttcatggccttgggactccagccaccccttggttggtcttctctctctttcctgggcctctgagccagaggggggagaagccactggaactccgagagggggttgtcggagagaccagaatggtggccatggcaacggggaaagggcattctggtagaggggacaggcaggggcatagggcagatacagaccctggtgtggcccgccacatgtggtgtctgaatgtgacatcgggacgtgtgagattggagagtctcaaccctgaacaccatactgaggtgtttgggttttgccccggagggtgctggggagccatgagagggttgagagcaggggagggaccaggtcagttctgggtatagaaatatctcaaaacaggagcctgcaggccaggagaacagtaagggaggcccaggcaaaatttcctcctccagatgggaggatcacttgagcccagggggttgaggctgccatgagccaagatcacgccactgcactccagcctgggcaagagtgagatcctgtctccacaactaacaactaagaaaaaataaaataaaatacatatgatacatttgtgagatacctatttacctatctatcgctaccacaaaaatggggactatacaatctgctactcaggtagctatttgcgttatttgtggcagatatagtctcgctatttttggtagttatgttgtacaactgtgaacacttattggggaaatatatgtgtgtgtgtgtatatgtatacacacacacacacacacacacacacacacacacacacaaacacatatatatagggttgggtgcagtggctcatgcttgtaatcccaacactttggttaagtgagacagtagaattgcttgagcccaggagttcaaggccagcctgggcaacattgtaagaccccatctctttaaatatatataaatataggccaggtgccggtggctcacacctgttttcccaacactttgggaggccggggcgggaggatcacctgaggtcaggagtttgagaccagcctggccaacatggcgaaactccatctctactaaaaaacaaaaaaacaaaaaaattagccgggcatggtggtgcacgcctgtagtcccagctatttgggaggctgaggcaccagcaacacttgaaccccaggcggaggaggttaaattgagccgagattgtgccactgcactctagcctgggcaacagagcgagactccatctcaaaataataataataaataaaaataaataaataaatagaaaataaatagaaaaatatatacttttattaatgaagcaatgggtccttatttgctgattcagtggtcacagttatacaacatcgctactatgaataacaagaattgattgtaaacacggtacctcacggcactacccagaacattccagaaggcaacacattctgcagagcaaacggcaccgtctctccaacaaatccatgccacagtgcaaaacaaaagcaagtagccttgctatatttgaaaaaaatccgttaagagacacaagaccagctttgaggggtgatcctggaccgggttttggcttggacaaaacaagttataaaggctctttgtgggtggaggccgaggtgggcggatcacctgaggtcaggagtttgagaccagcctggccaacatggtgaaaccctgtctctactaaaaatacaaaaattagccaggtgcagtggtgtgcacctatagtcccagctactcaggaggctcaggcacgagaatcatcagaacccaggaggcagaggttgcagtgagccgagatcgtaccacagcacaccagcctgtgtgacagagtgagatcctgtctcaaaaaacaaaacaagacaaagtctctttggggagaaacggagggacatttgaatagggaatgggtatcagacaagacgaaagcactactgccaaggagaagaggaggttaactgaaagacgcaggttacaaaattgcaggttctgtatgatctcattttggtaagaagtacatacatgaaaaactgcatttaaacatcaggtttcactctgtcgtccaggatggagtggagtgacagaatcagggctcactgcagcctcgacttcaggctcaagcgatgagtggctgggactacaggcatatgccactacacctggccagttttttggtatttttagtagagatggggtttcaccatgttgcccaagctggtctcaaactcctggattcaagtgatctgcccaccttggcctcccaaaatgacaggattacaggtgtcagccaccatgcctggcccagttatattgattttagacttccaacctccagaactgtaagggaataaatgtgtgtcattttaagccactgagtggtaacttgtcacagcagccaatacatcagtagataggaaagtgctgacatctccaggggctagaacgtggtttctagtttcttaattttgcttcaggatttttttctcttttctgttttttttagagacaggctcttggtttgttgtccaggctgtagtgcaaaggcacaattacagctcactgaagcctcaaattcctggactcacgtgatcctcccatctcagtctcttgagtagctgggactacaggcagatgccaccataccgtgcctggctaatttttgtttatcttttatagagatggagtcgggtgcggggggtgggtctcaccatattggccaggctggtcttgaactcctggcctcaagcaaccctcccaccttggcctcccaaagtgctgggattacaggtgtgagctgccagctcctggtctggcttaagcctccagcccttctacttctttattccaggggcctctaccctatttcaagtacgaggagagacagagattcacaaaacttttgtatctggtgcaggggctcacacctgtaatcccagcactttgggaggccaaggtgggaggattgcttgagcccaggagtttaagagcagtctgggcaacacagcaaaaccctgtctcaaaaaacaacaaaaacctaggacaggactggaggctgactgtgcgcagtgaggcaggagagccagccagccccaggtggtgctgcgaagtgtagattttattagcattgtgggatggtgaggccgcctgagcagcagacgattgccattgaaagatgacttgttggctgggcatggtggctcatgcctgtaatcccagcattttgggaagccgaggcgagtggatcacctgaggtcaggagttgaagaccagcctggccatatatatatatatacaaaaattagccgggcatggtcgcgtgtgtctgtaatcccagctactaggggggctgaggcaggaggatcgcttgaacctgggaggtggaggttgcagcaagctgagactgtgtcactgcactccagcctgggaaacagagtaagactacatctcaaaaaaaaaaaaaaaaaggaaagaaaagaaaaaagaaagaaaggaagatgacttgttatactcacagcttccccagaggagggggcatgccacaggggccacatggggacgcaccaatggtgcccaggaggtagaccacgagcaagcggcttccttgtgttttctgtgggataaggtagggtaaagagtggctggttgcgccatttcagcaggctctggggcacaggggctgtcctgagttgtccgataccctgccccgggtgatcagggcaggtggatggtggcctgggtggtgggttggctggtttgtacaggagaggcatgcgcttgggccagtccctgactatctccaggaactggtaaccctgggaggggtggtccttctacgatcagcaaggcccctgatgtcaaagcatcagagtacagaaaatcaagcacatagttactatcgtcagcctctgcaactcagggggtcaagactgttgctgagacgaacaatgtggggtgggggtctctgtccaagtctgcaaccaggttaaaggcacctgtgttcaaatcgcagctttgtctgagaaatctgtgttttctcaggccagttagggaacccttctgtgcctcagtttccccatcggtacaatggggatggtggtaagcacatcagtgtctcctggggcagcgatgaagatgaaacgaagatgaaacgggttaatccaaggctggcagaggcgctggggaatgggatctgtggcccctgggggagcgtgccagggcctgctataatgggggtgctgagtgcagggctgggacaggcggggctgcggcccagacagtgggctgagctcagcgtctgggctgggtggaaatggccggcctggggttttggggccaccctgctggacctctcctgctgctgctgctgctggtgctgccaccccgggccctgccagaaggacccctggtgttcgtggctctggtgaggcgcccccaccccggcctgcccttagctcccccagggctagccctgaccagtcctgtccccaggtattccgccatggcgaccgggccccgctggcctcctaccccatggacccacacaaggaggtggcctccaccctgtggccacgaggcctgggccagctgaccacggtgagaagcgggtaggcggtgagggcaagggtgggaggggtggggagtggtaggctgaggctgttctgtccccaggagggggtccgccagcagctggagctgggccgcttcctgaggagccgctacgaggccttcctgagtccggagtaccggcgggaggaggtagggccatagtgacccccacctggccccctgacctcccacctgtgacctccactgactacaacgctctctttgggcctccacctctggcctttgacctccatcaacctgacttgccctctacctctaatctctgacccccgatacactgactaacccacactgacttctgaccccatctcaacctgtcacatctcgacctctgacctccatcaactctgactttattttctggcctccatctctgttttctaagtcccattgactccagtcagacctctggcctctgacatttgaccccaaacttgatttcgatctttgacccttgttgacgtaacttgccctcttgacctctaacctttaacctctacgctttatcaattctgacctaccttttctgtctcctcctatgtcttctgacatcccccagctacagacagtcctcctaacctctgaagaacatgtattgaactctgactccaagtcctccaagctgccctcctaaacttgacctctaacctccagcctctactgattctgatcttcctttttgaccctcattgactcaattgaccccctaaatccaacatggctgtccagcttaggacgtccagcccaactgctcctgacattagcctctggacccttgatcccaacttccaacttcgaaggccacatgattctcagtgtctgacccctactccaaagtgaatctgaggcttctgatttgccacgacagctgacctctgtccccaaccacgaccccccgcgtgccctctctccaccccgctccaggtgtacatccgcagcacggactttgaccgcacgctggagagtgcccaggccaaccttgccgggctgtttcccgaggctgctccagggagccccgaggcccgctggaggccgatcccggtgcacacggtgcccgtggctgaggataaggtcagggggctggacccacgtgtggcgagggagggagcgggtggagagagaggcagctctgggtctggccgcctgagctggctccgagaagcaagactgtcctcgagctggtctgtccagaccagggtgagccccggcccacgctgctctcctggatctgggagaaactgcgacaaagacgcaggggccgagagcccgggttcccccgacccgctgtgagacccaaggcaaggcacacggctgtcctctctgagactcagttttccccagctgctgaggttccccatgcgcagctgtccccgataccacgagctgctgcgggaggccaccgaggccgccgagtaccaggaggccctggagggctggacggtgagcagggcggcggtggggggcgggatgcaggggatgggcctgggctcacccagccccgcgcatccagggcttcctgagtcgcctggagaacttcacgggactgtcgctggttggagagccactgcgcagggcatggaaggttctggacaccctcatgtgccaggtgagccctgccccttcccagccaagggtttaaggacacctgtttccaatcccagcttgctactcactagctgtgttccctcaggcatgtagttaatcctctgtgcctcagttttcccatctgcacagtggggatggcaacaccggtatcaacacctccccaggacgctgtgaggattcaaatgggttaatccacgcactgtgcttacaatagtgcctggtgtacagtgagggccttgccagggtttgaggctacacatttggcaactcctccccacagtcctataatcagaaaacccaaaacctgggcagcgggagctgacctgaaatgatgcaatgcttttttttttttttttttttttggagacaggatctcactctgtcacccaggctggagtgcaatggcattatcatagctcactgcagcctccatctccctggctataggaattctcctgcctcagcctcccaagtagctgaggcaggcaggggcacaccatcatgcctggctaattaaaaaaaaattaattttttgcagagatggggtctatgttgcccaggaactcctgggctcaaacaatcctttcgcctccccaagagctgggattacaggcgtgagccaccatacccagctagtactcttgctagtctttgctcactccagctcacgggaatgttctgaatcgcagggtgggagcagtgatgtgtgtgactaagggggctgccccggcccttgctgtgtgtgttccatgctgtgtggtgtcagcaccatcagacctttctaaagtccagaatgtctgagctgtgaaatacctctggccccaggggtttcagataaagccttctgggctgtgtaatgacgatgtctattattaactaataatcgctgttggctgggtgtggtggctcacacctgtaatcccaccactttgagaggctgaggtgggcagatcacctgaggtcaggagtttcagaccagtctgaccaacacggtaaaaccccgtctctactaaaaataaaaaaaaaaaattagccaggaatggtggcacacacttgtaatcacagctacttgggaggctgaggcaggagaatcacctgaacccgagaggcaagggttgcagacagccaagattgcgctactgcactccagcctaggtgatggagcaaggctccgtttcaaaacaaaaaacaacaacaaaaaaacactgttatccacatcatgatttcccagccagatccagatccggcccatggggggactcagaagagcagggggcagcacaggcctgcggggccagaggcaaactcgagggctcaggatggtccatctgtcctgtctccccacagcaagcccacggtcttccactaccagcctgggcctccccagatgtcctgcggactcttgcccagatctcggctttggatattggagcccacgtgggcccaccccgggcagcagagaaggcccagctgacagggggtgaggtgtgggtctgggaggctggggtgccttcctctgggagagtctaagctcttttttcccatcctcagggatcctgctgaatgctatccttgcaaacttctcccgggtccagcgcctggggctgcccctcaagatggtcatgtactcagctgtgagtccttgggaagcagtgccacatggcactgaggcacagggatgagggtgacagcgatttaggtgaggaagagcctgtggtcccagtggatctcagcccactgcctggggtaacccgtatctccaaaccctactctcaggctctaccattagtctggaaagagggaggtgacggtgttatgggaggaagaatttatgaataaatataattccttgttttctttaagaaactatgattggactaagcagtctgtccttccggaggagaaaggctgcttagtccaatcatattttgcacctacttgagcaatctttattaagtggccgcctgcaaatgttggtactgccttcaggatgggaggaaggagtagctttggggggttggttctaagaagcctgggggacatctggatgcgcaagtgtagtgctcaggagaaaggcctccagagagaagtgccgtctcagccctcgggtccacctgcagcatgacagcaccctgctggccctccagggggccctgggcctctatgatggacacaccccgccatatgctgcctgcctcggctttgagttccggaagcacctggggaatcccgccaaagatggagggtgagaatggtttggtgcccagggacatgggtgggacagaactctcaaagcaaggggtgatgtgtcaggcagagggcatggccaggtggggagctgcatgggatgatgctgggaggatgacaggtgggagtcagaagcccttttctccaggctttaagatcaatgacaggagggaggaggtgccaccatgtcctctctctccaggaatgtcaccgtctccctcttctaccgcaatgactccgcccacctgcccctgcctctcagcctccccgggtgcccggccccctgtccactaggccgcttctaccagctgactgccccggcccggcctcccgcccatggggtctcctgccatggcccctatgaggctgccatccccccaggtgacagtcctctgtgttggggtgggagtggagggttgccaagtcctggcactcaccccccgcgtgttctccctgcagctccagtggtgcccctgctggccggagctgtagctgtgctggtggcactcagcttggggctgggcctgctggcctggagaccagggtgcctgcgggccttggggggccccgtgtgagccagaaaccagggcttccctacccccagctgacactggaccccaacatgtatgctcagtagctgctctggcttctgtgacttactgtgcgcctgtgtgcatggggagcgagggctgtgtggagtctccggcctggaaactagtttgtgtgtgcatgtgtctgtgtgacggtggcatgagtgtgcatgcatacgtgtcacatgtgtgaacagtttctgcacttagacgcgtgcacaggtggtctgtacgtacatgctggtaaaaaacatgtctgtgacacacattcaagcacaaatgtacccatgtctgaacaagcaggcatgcctgcatggcacttttcttgtagagacaaggtctttgtggcccaggctggagtactggcatgagcatagctcactgcagctttgaactcctgtctcaagtgaccctcctgtttcagcttctacaggcgtgcacaatgcctggttaattttgttttcttggtatgttggccaggttggtctcaaattcctggcctcaagcaatcctcctgccatggcctcccaaagcactgggattacaggtgtgagccaccacacccaggtggtatgtttatgcacctttccatatgagcactggaagcaggtaggctggctgaggacatggtggaccctgtacgtacctccacttgcagcttgtgacaaggccttactcagtgagcctcaatgtggaccatgtgctctgtggagaccaggctcacaggagttggaccctcaagtctggttatttggtgacctccatagctctcaatgcaaccatgaacttgggtagagtcagagggatctggcagcagacctgagaaaggtgcacgattcaaagcctggtttccgaggctgtgcgcctctgggcaagtgataggccctgatgtgtctcacttggcagaaccacgactctaacccagtggactccacaactccaaaaattaacttcctagggacaggtagagagcagggaaaaccgatgacactctcggctgtgcactgtaactgctacaagtaatgtggaggcgctggccaatacagtagccatgaccatgtatggctatttaaatttaggttaaataaaatggagtgttcagctcccaaccatcacatgggccacacatccaccactgcaatcatttctcagatgctgatgagagctactcctcccacactcatgcagcagcaggcgctgtggagcacctgcacgggtgccctttgagcccctggccccccaaggggaggctcccatagtgtggcctagagcagagcgcccgcccctcccaggccttgccccacacccatggctgtgtggcactgtctaaccagggaacccgtagggagccctggtacagtggatgcttaataacagccacttggcccccattagatggggcagtcggagaaaggttcaaagccattcccagtgacccaggacctaaaaaaggcacaggatccagaaacgccagggagtggaagctgggacaacccttcctccacacaagggccacctgcatactgccctagcccatttcttcccagggtgctgagggcagcctctcatgcagactcatccctggggagtccccagacctgcctcactgccctacccggcattccctagaggagctgggtggtcatgggccaccccagatggatgccaggagccacgaccctgggaaggctgaggaatgaacacccctcacactttctggccctgggagggagcctggcttccttgcaggttcatggagaccccaagtgccaggtggggttacctgtggctgtgaccaactcccacctggtggcaagagcccaccctttcccagcagcctgctggaaggacctgttcagagctgggggcctgctagtgggcagaggcctgggtggctccccctggacgcagctcagcagctgaacccacagaggatgaagcaccagagtttggagtgttctgtccgctgtttaacaggggcccctgtgcccaaggcctcagctgtgaggtcagaactgctagggctcagtgagtcctcacagagctgtcacctgagattccggccccagcacaccctaaacccagaccaacacagaagccacacacagcaaaagcagacccatcagaagggactggctgcccacagcacacagccaatgcacgctttcagagaaggcatagcaacagagaccttaagagaaaacccgtgacaggccaggcatggtggctcacacctgtaatcccagcactttgggaggccgaggtgggcggatcacctgaggtcataagtttgagaccaccatggccaacaatggtgaaacctcatctctactgaaaatacaaaactagccaggcgtggtggcaggtgcctgtaatcccagctactccggaggctgaggcaggagaatcacctggacccaggaggtggcggttacagtgagctgagattgcgccattgcactccagcctgggcatcaagagcaaaacagtctcaaaaacacaaaacaaaccaatccttataaaaacggagtaaaagcttcaagatgcttttatgtcaagggtgtggggttgccctgcttggcctgcagtgctttggggccccatgtggtggaggggtgggcacccatggtacccacccaccctgctgcctgggcagaagtgcaacatggcacacgatgcctgggggatcactccccccagggactcatggtcagtgtccactcacaaggcctgcttccctcatgacatctggccagtgacacccacaggggaggttgggggcagacacccttctcttccggtacccttgaacatggtgtcagggtgtggctagctcgacggacaccgaacagctccacagggagggtagtgcccaaggctttttgcctcccctaccatgtcccgcacttcctgaatgcagctcaaaccaggagcagctcccccaggattctggcctgcttcacccctggagcaccaggccaggcggtgtctgtccttgagagccaggcccaggtctcacggtggcgtatggacagctcctccccataggcctggtcacaatagggaagcgggggtggctcctcccctagcctgcaggaagcccttggtagcccacttatccaccttctcctgggtgtgtggctcagcagccaagtccttgtgcactgggttgggtcccagcatgagcctggtggcctggcgggccctggcaccatggagagcagcctgctgccagtgatggcctggatctccaagacggcctccagcactgtcatgcccttgaccagctagtgctggtacaggacctgggtaacaggcatgtccttgggcgtcactggctcaggggcagaggacgaggttgaggaggaagctggatacccctgtccatggtgggctggggctggaagggtggctcagtggcctcgaagtgccgggaggactcccagctggcaccaggccatcagcagccgggtgggcagtgccgtgctgctgttgccctcagggccttgcagtggtagctgaagatggcaccttatcaggttggatcaggtcacccggcagcagcagctctcgagagctgaggcacaaggcaggggcccggctgtacacctgcaggacccaggagagcctgttgcagttcttgcccgaagcgccgagatagccagctcagtgtccctgcagcaggagcagaaccagctctggcccaggtgggtgggtggcagcgctttcctagccatggctgcagccacgcctaggcaggaaacagcagagtgtctggagggatgctgtcaggggaaggacacagaaaaggcacgaatgggggaaacagccacacccccaccatcacctcccggagtggggcccctcagaaccccggatgtcaaaggtcccggggtgcaccgtgtcctcaggggcagtcagagcccagtgctggacatcacggggtccccaagtgcagccctttcaagaaccctggacactggacatctcactgcaacccagccccagcccccatcccacctccgccccccaacagggttactaaggttaatgagcccagtgcttagggcagcgcctggctcagcacttgctgggcacctgtctacatctgccttctcaccaacaccaggagtaacaggcagcctcctctgttcttaatgagtgatggtcaggcccttcagcacctggaggcaggagggcacaggggaggggagaaggtcagtggggtgcagggcagccaagatacccaccagccctccccagagccagggcccctcagacccccgggtgtcaaaggtcccggggggcaccgtgtcctcagtggcagtcggagcccagtgctggacatcatggaggccccggtgccctcaccccctcctgatgtgggtcccaggaccacctactgtcctaagggggacatcacagaagagtgctgagagatcaggcaacaaactgaatgacacttggtccctgggggtgccaggctacctcccctccccatccagctcagcctgggtatggctccttgtatgatctaggcccactgacctcacccctccccgccccccagcagcagtgtttctctggaaaacgggactagagatgcctgcagacaggcacatctgtggggttcagtgagaggacggggccaaacccttctgcttgggcctcccatgcctaacgggatacccctcaatcgcctctgctgcccccggcccagctcttctaagctgctctgacttcaccagaaccttctgtgacatggggaaggggcagctgcctctcactgggaccctggcaggataagttcagtttattctccgcaaaagcactaacactgtgggtgctcgctcagtgggtgctgctgtttaacaacctcagaaacaccaaaagccccattttgcatagaaatatgctttgtaggaagaggggggtccttgtttaaactaatcaaggaaaattaaaaacccagcccccagccacaaactagccacattccaggtgtccaagagccacccgtggccagtggctgccagactggacaaggcgaggaacatttctatctggacagtcgtaaggaaggcgccggcccagaatccacaaatgctacgtgtcccttctgtctccctatcccgcatcagctctgtcgtctcacctctcacacatccctacccaactggcaccgacaccactcatgtccccaagaatcccctctaagccagccatgacaaacgctcagctccattcactaccccacagaggatctcggattaagagcacaggacccggccgggcatggtggctcacgcgtgtaatcccagcactttgggaggctgaggcgggtggatcacgaggacaggagatcaagaacaccctggctaacacagtgaaaccccacttctactaaaaatacaaaaaaaaaaaaaaaaaaattagccgggcgtggtggcaggcgcctgtagtcccagctactcgggaggctgaggcaggagaatggcgtgaacctgggaggtggagcttgcagtgagccgagatcgcatcactatactccagtccaggcgacagagcaagactccctctcaaaaaaaaaaaaaaaaaaaaaagcacaggaccctcagaaagatactcaggggaactgcaatcccagccaaccctgcccaaaagccagcttccctgccagaaatagctgaaacctccaagaacccggagaacacactttcagttctatttcgctgcagccacggttccagctcctgacacctaaggaacaaatgaaaatcttcccagagctgagaacacctgtctcttttctgataacacacactcatgcttgtctgattttgctctttgaaacaattctcctgataaagcctgttatttttattgtgaaaataggagttccctgaattctatcagtttatatataaacggttcactgcaggctaagctgtgcttaaagacacattgcattcagcctacaaaacccatgaagtaacgtgacagaatcacctggtagttactgtctcttttccactgctgagttttgacatgtttgattagttctttcccctgaaacgcaaatgcttgttccctccagtccacgcattcctcttcttattcaagccccaccttcagaaggcgggaagcgctagtgccccgggccatttgctcggtgcctgttccacagacacagcagtgaggcgcaaaagagtgatggcctggtgaatgtctccaagcctgtaaacagcagagctggggtttggacccaggcctgcctgccaagttttccatagttgtgagatgggtgtttttttttttgagatgggagtttcactcttgttgtccaggctgaagtgcaatggtacaatcttggctcactgcaacctctgcttcccgggttcaagtgattctcctgccttagcttcctgaatagctgggattacaggcatgtgccaccacgcctggctaaatttttttttttttttgagacacagtcttgctctgttgcccaggctggagtgcagtggcacaatctcggctcactgcaacctctgcctcacgggttcaagcaattctcctgcctcagcctcctgagtagctgggattacaggcacccgccaccacgcccagctattttttgtatttttagtagagatgggggttttcaccatgttggtcaggctggtcttgaacccctgacctcatgatccacctgcctcggcttcccaaagtgctgggattacaggcgtgagccactgtgcccggcctaattttttgtatttttagtagagacggggtttcaccatgttggctgggctggtctcgaactcctgacctcaggtaatccacctacctcagcctcccaaagtgctggaattacaggtgtaagccactgcgcccagcctgagatggtttttgtatgtaaacactgagtacaatcattggcacatcaatcagtttctagaggtacggtatgaagtcaacctagacagtgagatattttaaacccaggtgagtgaaggagcaggagcaagggttcttacctggataggcatggtgggtggtcctaagcttgaagctgcacctgtaacacagaaagacacagtgagagtgggggaggaaacagtctgcaagtccacaagccattaaaactggggcccctcagacccccaggtgtcaaaggtcctggggtgcactgtgtcctcaggggtgatcagagcccagtgctggacatcatgggagccccagcccctctgcaaccaggtcctgaggccacttaccttcagggacagaggccaagctaacagagcttaaagagtaggaaacgcggccgggcacggtggctcacgcctgcaacctcagcactttgggaagccgaggtgggcagatcacgaagtcaggagttcgagaccagcctggccaatatggtgaaaccctgtctctattgaaaatacaaaattagccaggcgtggtggagaatgcctgtaatctcagctactcgggaggctgaggcaggagaattgcttgaacccaggaggcggaggttgcagtgagccaagtcgtgccactgcactccaacctgggcgacagagcaagacttgtctcaaaaagagtaggaaatgcaaaactcatccagaaggtaggaatgaccagttttgctcatggagacaccaagatgccccaacctccccagtgtcacaggtcctcgggggactgtcctcatgggatgggtaggaccccaaatgcactacatgaagatgtccccggtgttcatcccccactgtttgcaggtttctttagcactgcctacatctgcacataacccataaacagagaaagctgccaagacacaaatcccctggaagaacttattgagagaaggaagaagaaacaaagccaacttgtaaataataatgaggagagaccctcgactgagtcaggtttgaacatatcagctgtaaaagacatttcgaagatgactgaggaacaacaggcacaaagcagattgttaaattgcagtattaagggtgacaatgctaataacattaagtagaaaaatgttactgtaggtacacaagtacactattttgagtgaaatatgaacctttctttcaagtaagagtctgctctgttgcccaggctggagtgcagtggcgcgatcttggctaaaggcattctcccacttccttcataagtagctgggactacaggcccgcaccaccacgcttggctcactttactatttttttgtagaaatggggttttgccatgttgctcaggctggtcttgaactcctagggtcaagcgacccacccacctcggcctcccaaagtgctgggataacaggcatgagccaccgcgttcggccatgaaacttactttcaaaacacttaagcacaaggtttttgaatatggcaagatggtgcaaatgttaacttttcccatttgttggtagattttaatattgccaaaggacgacgtgccaacgatgaatgcatgaaaaaatactttcacttgtgacatgaacaaactcaacgattttctaggtggttgcctgaaggaggtaagtcaagtagagatccttgctggggtcgtggtgggggagataggaaatgggctagctgcttccaggctgagcctcctcggcaggggcatgggccccgctcaagtcaggaaaccgatgttcaagaccttaaaggacctaagccaaaaactaacgttaacaaaaccctctcacgtggcatgaacggtcagaacgactcccgcaggtaagcaaaggcctcgtttgcttccttctatatccattcctacacgactctcaaacccggcaattcacctagaaacttcactctcacttctttggtaactcgataccctatctgtgcccccatggaaccccccaaaaccctctcccgtcccccagtctttgttctaggttgcacaaaaatgccagccatccagaattttaaaagcaagagagaattcctaaggaagcacctgtaggtagcacgaaaatggaaacactcggaaagaactcaatgtcgcctcccagcccgcccacccctctcccccaaccaaatcgacaagatggcggaggcccgcggcgtgcgggcagcacaaggggcgagctccgccgcggggcagacggaggggggtccgccccagcatccccgctcgcgccagctataggagtcgcaaactcccaggcggcccaaacagccaccaccatccccgcagaaaactcccaggctcgccccggagggcgctctctgggtccttgcaaacgccctgaccctttccacgcgactacatggccgctcccgtcgcagcctcgaacccttcaggacacgtgcgtctttccacacagccggaaaaagtaataaacttaagaacctcaccccagcatttctctctccgaagcgggcgcgggttgcagcacgcgccattttatagtgcgcgccgctcgcaaggccggtcctcggcgccagcccgcgctccgcccgaggcgtccaatacacacgcctgtttgggaaaccccatttcatgcttagggaaaggaatactgcctgcttccgctagaatcttcctgaacaagcgaggagacgctgtctctggggctgacaaaaaggggcaaggatatgatggaaacgattgtcttgtcccctgcgtccggcaattctgaagacagcatcaaagatgggccgtgaagagaaaggaccccgagggcggcccgacacgagagagaatccgctgggactatttgcgcggcaggggcttgagctgagtgaggctgcagaggcggggcccaagccgaagggccggacccaaattaagtcccagccactgggctggaggcggggccagtgtggagattgacagggggccgtcctgggaaagcgcccacgtggcgcagaattagaggcggagcctacacggtgacgcaagggccggaaggagggaccctgtgtctggagaagcgggagatgggggcctggacccctgggtctgagggaggaggggctggggtcgtgattcccgtgtttgggagaaaagggggttgggagctgggactcctggggccgagggaggcctttggggctcccactcagttttgacggtctaaggcctgggggcctggattcttggtagggttggagatctcaggagtgtctttccactgataggattatacattctttccacttatatgattattttgaaaattaaaaaatgaaacttctctactccaaactcactttctaggagtttcactgtcaacaatttggtgtggactttatgttttcttttttcagatggagtcttgctctgtcgcccaggctggagtccagtggtgtgatctcagctcacttcatcctccgcttcccgagttcaagcaattctcgtgcctcagcctcccgagtagctgggattacaggtgcctatcaccacgcccagctaatttttttgcatgtttagtagagacagggtttcaccatattggccaggctggtctcgaactcctgacctcaagtgatctgcctgcctcaaacctcccaaagcactgggattacaggtgtgagccaccacgcctggcctggtatggactttatatatatatacacacacacacacacacacacacacacacatattatggataaagatacttttttccactctaatctgtcccataagttgtttccccacatgagtacgtacagaattatctcattcactgaacaatggcaacgggctcctttgtgtgaattgaacacgctttgtttagcgggtccctggtcatttgggttgttttcttctttctagtgaggagattcctttcatgaaccttgtggtctggagtaaaagaagagacctacattcctctcttaaggcaatgagagacgtttatgtcactggctgctgcctcactttagcataaaagcaaagtcctcgctgtgacccacacagcccttagtgatctggcccctgtcccctctcagcctgcatctctttcctctcctttggcctccctggtgctcctggaacctgccaaggacgtttctacttcagggactttgcatgtactgtcctctctgcctggaactcttttcccccatctacatggctttctgcctcccttggtcctatctctgctcagatgtcatcctggaatggagtctcctgacctccttgcctccactttatatgactgtgaggctctcttgttccgaatcccatctcacctaccctcctatatttttcgtcataacatttacctctaacctattgtctgctttattttattttattttttgagacagcatctcgctctgtcacccaggctggaatgcagtggcatagtcatggctcactgcagccttgacttctcaggctcaatcaatccacctgcctcagccttcatgtagctaagactacaagaggacaccaccacgcccagataatttctgtattttttgtagagacaaggtttcgccttgttacctaggctggtcttgaactcctgggctcaagccatctacccacctcagcctcacaaagtgctgggattacaggtgtgagccaccatgcccggctctaactacttgtttatggacatattttgctgccttgctgaatgtcaattccataaagataaggattcgtgtctagtttgatcagtgctatacatccagtgtctagcatatggttgcagctccatctgtgtttaaagatgaaatttgcagcgaggagtggtggtttaaccctataatcccagcactttgggaggctgaggcaggagactgacttgagcccagaagtttgagaccagactgagcaacatagaccccatctctagaaaaaaaatttaaagttagccaggcatggtgtcacatgcctgtggagccagctactcaggaggctgaggtgggaggattgcttgagcacaggaggttgaggctgcaatgagctgttgcaccactgtactccagcctgcgtgacagagagagaccctatctcaaaattaagtaagtaaatgaataaatttgggagccttttgcaggagacaagggggaggattattgcaatagtacagaaagagcacacactatggaccaggcattgtgctaaatcctatctagattaaagtactattattatcctcattttacagatgggttctacaccttgcctgtggtcacagagctactagtgacagagcctggactcaaaaccaggcagcttagccactgtatgagagggagatagatggcagccccaggccaaggccctgtaggacaatgatatgactttgtacttggctttcaactctgccctgtccaggaaatggctctctgttagccccaaaccatcttcaaagggccattacacagccttgtgctgggggactctggggaaaagaaagacggggtggtggtaagagctactgttaagcgtaggaggtgaagtgtgggtgcagggggaatttgcttccggaagggtaaattattaaggactgcaaaaataaaggatgaagctaaaagggcttggggagaatgagatattcggcaaacactgattaagcactatctgtatgccagggaccattggctcggcctctttgttgaccttgtgccttgagtcccttacttatgagtcccttcccttccctatccctctaccccagagggcccaaagatggccccagagaggggtttcagttccaccaatgcttccaaggctcagagctaaattaaagaatattctgggcagaaaatacagattattttaaaagaaagattattaatctggattgaggcgggtcagaagagactgaaaaaagatgagtcttcatggggttaggggccagagagcagggttgtcagcgtggggttaggggccagagagcagggttgtcagacacttggcagagagctgttggagcaggccagcggtgagatcattcgcgtgtcttaggtccggatgggctggagcgccaggatagaccagaagtacatgtaattcagataggacaagaagccttgtggagaggaagagggcacaggagatgagacacagagttcacccacccaatcccaatcacagtcctgtccccaggcccaattgcatgccctgctctgcatcaaaccccatccccaaacctattcttaaacccatcaccaattccattccataccctaacctattcccaaacccatctccaaaccgaaactcaccttcatcccctacactgtccctaacccatacgcaaactccaacccagtcccatccccattatccagccccatgtgcatccccaatcccgcctcccacttcagtcacttcctatctagccctgtccacaaccccaccccgtcccaaatgctatcccaaatgctattcctgtctgcatccctgaacccatacccaaagccaacctcatcctctcccataccagtcatcaggaagaggaagacactggcccaggtcaggtagaagctgagtgccagctggtaggtcatgccttcctgcaggtacctgtgggcctgcagcaggtagaacaggatacccagtacgatgctggttcctgcatgagcacaggtgttaggaggctgagaatcagatatgtaaggactccttcccatagtcatgtggctgcctggctctggctcattatttccccactttctttaacctcccagaccctgtacctttgctcctaagcatgaagatgggcttctgaccaagtcctgctagaggacactgaaagggcaagccttgggctttaaccaggcaatggtaagtctgtaaccacaggttttgaggccaacagcagggatcttccctgcctccacctctggacttagggcagccatgccatatctctgagcctcagtttcctcatctgtagagtgggcacaatcataggacccatctccttgggccgtcatgaggagttactgaggttggcacatttcctgatacacagcaagcccttagggattgggattgattattttcattctattgggtctttaatttagggcttcagaagcaatagacaaggaacttggtcattctggatatattggaatgacatgaattaaagataatttgtgaataggaaaagactttttcccctggacagtggagtactgggtagttttgtctgatgttattgaaaataatatagaaggtattttttgtttaattaaaaggaggaatagacagaaatggttttcttatagaaaaatgttctgttatagatggtttaaaacgaaggtgttttttatagtttttagaaaactcatgctttttttgcgcaatattctataccttgtactttatatttaaacaattaggaagagctactagataaactgcataaatgcttttttttttttttttttttgagacagagtctcaatctgttgcccaggctggagtgcagtggcgtgatcttggctcaccacaacctccgcctcccaggttcaagcaattctcctgcctcagtctcccaagtagctgggactacaagcgtgcgtcaccacgcctggctaatttttgtatttttagtagagatggggtttcactatgttggccaggctggtctcgaactcctgacctcatgacccacccaccttggcctcccaaagtgctggtgtgagccactgcactcggccaagtactgacatttctaattcaatcctcagtacgtttccatgtggtagcaaattttgtcctgatcctacagatgagaaaactgtggcttggagagatgaagtagcttgaacaaaatcacagagctgctgctgctgatgggacaggatttgggatgaggttagaatgggaaataggattgggtattgggtagaggttgaagtttgagtgttagaggacgaggttgagagtggtgtcaggaataggttgcagttgggatgggttgtggttgaaggtgggtcgtagttggggtgggttgtggttgggggtgggttatggttaggggtaaggatgggttgaaatggggtagtttgtggttgaggatgggttggaacagggatggtctggttgggggtgggttgggatggggatgggttgtggttggggatgaggatggggatgggttatggttggaagtggattgttgtggggataggttatggttgggggtgggttgtggatgggatggttgtggtttgggttggttgtggttggagtgaattgtggtggggaagggttgtggtggggatgggtggtggttgggggtaagttgtgatgggagtgggttgtggatgaggataggtcatggttggggatgaaaatggattggatatgggtaagaggatggagtggggaatggactagattgagtttggcattgaagttcacaggtgatagaattgggttgcatttgaaacatatgttgaggatggttgggatgctgcaaagttggttgttgagatgtttgaagaggttgcggatggtaatgaggatggtttggtgattggaaagaatgtagaattgggatggagtaggggcatgagggaaagggatgtgaatgagtttgagatttgttggtgatggagatgggacttgaagtggaggctggtattggggctggagatagggttgggctggtggttgatgttttttatgggaatgggttagagatttggaaggagatggggttgggattgcggatgatggtcaggatggggatgggattggagtgtggtggggatgggattgggtttcatgattggcactggaggaggtactcctcgccttggttcctgagggaagtgccatgcctgtcaggatgctggtgatgaaggtgaagaaatccagcatggacgggttggagccggtaaagaggatggtgcttattagggctatgcaaaggcagaagctggtgatgctggagaagaggaggaaggcccaggaaaggtccagcaagtctggggaaggaagataatcaggaacaccatgattggcccaggctctgagtatggggacaagggtcaccagttggtgtgggagtattctcaaagctcctcccttgcaaattatttattctcattttaggaaaatttaaattgggctccagagaagagacattgagactgatacttccagcactgaggatctacctctaggttggtgagggcagcttcttgggcagtgagaagtggggtgggcagtgaggagcattcccagaagtgaggaccactctagggctgtgaggacaatcctagggcagtgagaaccctctgaggcagtgaggaccgtcccagtcattgaggaccatccgagagagtgaggactatcccagggagtgacgaccatcccaggcagtgaggaccatctcaggcagggaggaccatcccaggcagggaggatcatcccaggcagtgaggaccatctcaggcagggaagaccatcccaggcagtgaggaccatcccaggcagtgaggaccatctcaggcagggaggaccatctcaggcagggaggaccatcccagggagtgaggaccatcccagtcagtgaggaccatcccagggagtgaggaccatcccaggcagtgaggaccatcccagggagtgacgaccatcccaggcagtgaggaccatctcaggcagggaggaccatcccaggcagggaggaccatctcaggcagggaggaccatctcaggcagggaggatcatctcaggcagggaggatcatcccaggcagggaggatcatctcaggcagggaggaccatcccaggcagggaggatcatctcaggcagggaggaccatcccaggcagggaggaccatcccaggcagggaggaccatctcaggcagggagggccgtcccaggcagggagggccgtcccaggcagtgaggaccatctcaggcagggaggaccatcccaggcagggaggaccatcccagggagtgaggaccatcccaggcagggaggaccatcccatggaagtaagggccatctcaggcaatgaggaccatcccagggtggtgaggataattctggggcagtgaggattattccagggcagtgaggaccatcctggaccagtgagtactatcccagggcagtgagaatcattcgagagcagtgaggagtatcccagggcagtgaggactatcccggagcagtgaggaccattctagagctgtgaggactatcccagggcagtgaggattatcctggggcagtagggactatcctatgacaatgaggaccatcccagtgctgtgaggaccatcctggggcagtaaggaccatctcagtcagtgaggatcatttcagtcagtgaggatcatcctgtggctgggaggaccaccctggggccgtgagactcataaaatacctgtgaagatcattgcaggaaaggaagaaaccattctgtgacaggtggaggggtccctgggataaagtggagcgatgggtcccaggagtggtgagggcagggcaggccttccaagcatcctggctgtgctcatgcaggcaggagatgtcacagcactgcttctcctcccccagaagtctagctcagaacttggcctccggcctgggcactgcctcatacctgccagaattgatctcaatggagctgcacaatgagaggttttgcatgttgtctagaggactttggttgagttcagagctgagcacacttgccttcagactctcctgggactcccaggtaactgattcaatgcttttgatactgggctcggggccgtaggtaagtgatgggagcacattgacaatggcccaggcttggaagttgggggttggaacacttaaatgggcagtctcggttgttgacaggtagttttggtcatgatctttgttgctggggataattgatgattagtcagggggtgagagccttggatactgaagcagcgagtttggaaaattggtgaagcacctcgcatactgaaatcgtggctgtaggtaatggctggtgtttctgggatactgatctgttgactgctgatagctggtgtagggtcttggatactgacctggtgattgtgaataattggcaaggggtcttggatactgaccaggcgattgctgctggctggtggaggctgttggatactgaccccgtgactgttcctggctggtggagggtcttggatactgacccgggaattgtaggtaattggcaccaccgtgcctggctaatttttttgtaattttagcacagatggggtttcaccatgttggtcaggcgggtctcgaactcttaacctcaggtgatccacctgcctcagcctcccaaagttctgggattacaggcataagccactgcgcctggcccttattattattttttaaggtatagaaatctagaatttttttttttttttctgagacaaagtctggctctatcacccaggctggagtgcagtggcatgagatctcggctcactgcaacctccgcctcccaggttcaagccatcctctcacctctgcctcccacgtagttgggactacaggggagtgctactattcctagctataattttgtattttttggtagaggtagagttttgccatgtttcccaggctggtctcgaacttgtaagctcaagcaatctgcccaccccagcctcccaaagagctgggattacaggcatgagccactgtgcccagccttagaatttttaggtagtttaatttcttcacctttgtctctgtgactttattaattgcttcttggcttcgggaggttctccctccagatttttgatgaacattcagttctgtttttttaaattctcattacttatttttaggttttgattgtgattttggagttggtatgcagggaacattgaattctgtgctccctgctgtcctaaggaagggacttgaattagtcaggagtttttgggtcacaagtgacacaaactctttttttttaaattttttttattttttacttttttaaatttgagatggagtttcactctttcacccaggctggagtgcagtggcgtgatcttggttcactgcaaccttcaccccccgggtttgagcgattctcctgcctcagcctccggagtagctgggattacaggcgcccgctgccatgcccggctaacttttatctttttagtagagacggagtttcaccatgttggccaggctggtctcaaactcctgacctcaggtgatccacctgcctcggcctcccaaagtgctgggattacaggtgtgagccatcgtgcccagccacaagtgacacaaactctaacttgaactagcttgagtgaactagttgtattagcttgagtgaactaacttgaactagctaggggatcctttatgggatcacctgagtgaaaaatggtaatggtaggaatgccttcaggcatgggtggatccaggggcccaagtgatagtatcagatattactgttttttggctatgggattggcttcattctcaaggctctgtgtagtggcaagtcagaatccagtaaggaaaataaatcattccagattcttcagaaggaagtaaatacagggaatttgttcgtgagtaacagaggagctgagaagccaataggaaatagtgaggcaaaccaggagttaggaactacaggatgctgctacttggccagaaggacaaagggaggaggtggtattactacagtccagaaactgcagccctctggaacgcataggttcatggttggattgctcagaagtggctagaatcagagaatagatacaactactacggaagacccaccacatgcagagatagagaggctaataaataccctggcttgccctctcctcccagaaccagtcttctgccagtgcctcccattagtcaaacacagtgataagatggtgagcaaaggaggctgggaaatgtggtccttgcagtgcagaacaggacagggcgggaaatggatctgagagcagacagacaaaaaactggcagagttgttagcaacttggcagagttggtaataactgccgagtccggtagaaaaaagttatcaacagttcttgcaagaatcctgtgtggcttggggcacatgagcaccccgagccaattatatggccagtggagtacagttggctgattggcttaagactggggctgagaatggggaatgggcaggaggtgaaatgcatggtggggaggtaagctgcaaatatccactcattctgaccaaatcacagagtgggctgctctctgggatgacgagagccagggacttcagtgtcagctcaatgctctttcgcttgtctgttttccttcttagttttactctccccatgaagctaggtccaaggcttaggcagcttcaggcttgtaatccttgaggagagactgcttttccttgacagcttcctaataaaaagtcttggggcagagcttgattggttgggctttggtcatgtgtccatctttgggccaattgcagggtctgcagctggggtactgtgattggctcagccagaatcacatgattacctctgtggcccagaggccagcatatgccaggagaatccctcatccagggttatgtgagttgggtggagggtgtccccaagagatgtcaggctgctgttctgggcagaccaaattcaccattcaaggtcttggtttctggcttggtgccttctccctgacctctgcttcttgactcttcaatgagcagaaagaactaagggaactggctgggcatggtggctcacacgtgtaatcccagcactttgagaggccaaggagggaggattgcttgagctcagtaatctgagaccagcctgggtaacagtgagaccccatctctatgaacaaaacaaaacaaaaacaaaaaaccaaggggtctgatatttcccccacttcccagagtgctgttgctcttctgtatatatgatgatcctttatctttcttgttgggtattagagatgtgcagtttgccagaaacaaagcagatgaggtcttggcctatttggctaaaacaattttgcactgttgaaaagtagacaaagtagaaaaagggctaaaaggaggagatgtagcatctcggaaacaggtaaacctctcttctgctggaagtctaagttggataaatatccactgtaaactggaactaagcttttgggcacattggttttagagtatttgacttgaaagtttttcttgtgtgcaaatctgtatgtgttttgtgggggctctcaggtgtgaacaagagatgacattaggatgtctgaggagattctcggcatgtgaatggggccactaggggaccttggggggtgactagcagagactagagcagaagtagggtgactttggagaggactggggtgaccgtggtgtcttggataactttgagggtgctgttgagggtgtctgggagtgaaactgaggatactaacatgagttgttatgagacaccttttaggagttcaagtagggtgaccaggggtgtctgtgggggtggttctagaaatgatcgaggctgggctcagtggctcacgcttgtaatcccagcactttgggaagccgatcacctgaggtcaggagtttgagaccagcctggccaacatggtgaaaccatgtctctactaaaaatacaaaaattaggctggcgtggcagcagctgcgtgtagtatcagctaatcgggaggctgaggcaggagaattgcttgagcccaaaggcagaggttggagtgagccgagatcacaccactgcactccagcctgggcaacagagcaagactccatcttaaaaaaaaaaaaaaaaaaagaagaagaaagaaagaaatgattgaggtgattctgtggggtaaccttgaggatgagtgggatgacctttggggggtcctctgtggggtgaccttggggggtgtgtgggattatgagagtgtctgagaattgagttttaggttaagtaggggtgatttgggacaactctaagggtgtgactgggggatgactttaggggtccctgggggtgaccttgtgagtgagattggagtttctttggggtttctaggaggtgactttggggaggtgagtaggggtgattttgaggatgtgccagactttggggttgtctgttgggctgcttgtgggtatcagcagagatgactttggagggtgaccaagaggggtatctggggttgactctggggcccctgtccccctctccccagttctcatccatatgagcaagggcttcatgttactggccgtggccctgtgctgagtcctcctcccgcccatggccctctcctcctggccagtggtcctccgcctgaacatggccgactttgtcttcagtttcctctgcctcggcattggtaggtgttggcttggggggcgggggccctccctaaccccagccctgctctctggctttctggaggtgtatctagacttccgtgctgctcccctcggggcctctgtcttagcatgtctctggggagctctgactcagttctactctatctgtgggatgtctctctctcccccactctctgtttccctttctttttttgtcccctctctccaggtatctttctgtctgttgtgagggcgtgtgtgtgtgtgtgtgtgtgtgtgtgtgtgtgtctgcttgtcacggagggtgggagaggatgtctcagtccctcttttcttactgggggtcatagggctcactgtccagccttctgtctctggccccaccccattgcagggctcctgatttctcttcagcctgacgctcttttcagttaacggcaaggcggtgcacccaagtccggtggtgtcctacctggtgacctcctacctgtgctgggacgccagcgacttgatgctgcactccggtgagggcggggcctcgggaggagggcggggcctcgggaagcgggtggggcctagggtgggactcggagtacagcggcccacctagccatctcccaggagccgtgtcctacctaagcccagtgggcatgtgaagcagagggcagcccttgaatgcgcggcggctgagctaccgcgggtgggccgtgcagcagggcgcagcgaggcggacatccaaacagcggaactcagacgctgactccgagcgcaccccgggccttcccatttcatacaccctcgaggatgagacccaagcacctccaaggaatagcacccgaggtcttcaggacaccgaccggtagccatggccagatgcccggccaaccccttcagcgtggccacgccctggatattcgacctcccctgaggccccaccccctgatatcaggccacgccctccgaggggaccggtggcaaactccagccctcgctctagggcccgccctttgcggctttgtccctgcccactgggtcctcacagtacctccaccccagaggcccagcatcccctcccgttctgcagacacttgtccagcgtcccgctgagctcggcagtgtggctagtttgtgtggccctgcccctggtgcccagccagggtggtctgcatggaacttctttcccggagttccggcctcagctccgatgtccacccttgtccccaggtggacacagcaccgcccagcatttggtgcaactccacccttctgcagaacgggcccctccctgggaaggcatggcttgcaataacatccctctgtaccttttctggcttccccgccacaataaaacctctcagcctcagaccttccattgccccccacctccccaccagggcagggtccatcctagtgtgagtgaactgttctggcgtccctgacttgccctttgggatctgagcctttccctgcctgtttgtctgcacctgtcacagccccttcctttccccacctgctggtgacctcagacttccaggcatgagattgacacagctggggtggccccagcctcagccgagtgggtccaggtgcaccacatctggaaagataggtgatggcagaacgtgacacacattggatgcacatttgattttactgggggtaggggacagggctgggcgttcaggagttctccgctatggtgtcctcgatccacttcacataagacagcactctgacggcgacagaaggcttattgggggtgccacaagggacgtagccccatgatgtgacaccttggagcacaccatcacacatcagcgggccccctgaatcaccctgggagcacaaggtgggaggggagagtgagaaaggtctacggggcccaagttctgcctggggagccccagctcgcagacagggcctccagtgcccactcccagaggaaggtgggcagggattcccacagaggggacagggtctccagtcctggccaagggggaagggacctcagggtccagctcctgcacatggggcagggtccaggtggacagtgcctgcagacaggttagggggaggaggggcaggaccatctgcaggacgctgcccctgcgggcacatcgcagaggccacctctccaggactactctctgactcgacggtaacaacacattaccacgaggaacggtgaactctggtgtggggggtgagatgcagttgtccctggatgggcgggggaaggagggggagctggggcactgatggggcgagtggctacagctagctgggaagcagtgaagcagatgcctggttagctctcagaagccagttcagaggctgagtcccctccctcagcccttccagaccctgggggcagggctgcctcaccacacaggtgtctttgccaccttccaggtgtccgacacacagcatgaagtctgtcaccttctggacgtgggcttttttgcactcatcattaggcaggattttgaggtccacacactggagatcatctggaaatgagactacgaacccgggagaaaaagggctgcagcccgacctcacctgcttccctggccctttctcccttggacgcaggagtccccatccccgccttgggctacacagtctgcccccacatacaattctctggttcgatgctgccccagccggaagccaaacaggtgctccccacttcgggttcctcggtgggcaactccacgaccttcacagcatctgtgatggtatcagcaggctctgtcaggcggagcagcatgaggtcgtggctgtagtcctcgtctgcttggcgggtgtggttctccaggaggctcatgttgaagccagggtgtgggaagctctcactgacatgaacaaactgggctgtgttttcgtcgtcaaacaagttgtggcgacccagccagagctggtaattgctggggaaagatgggaatggagggatgagaagacgggaaggggaaaaggggatggggcaggggagcatgggggagggtccccaaagagagaaagggaaagagaaaaatgtgggtgggcggagacagaggaagaaagatatagttatggagaaatacagacagcgaatgggaagatgaaagattttgagagtgcaaaaggcaaatgaagagacagagcaaaaaagagctcaaaaggacagaggggtgaaaaaggcggaggggagggcagtgagaaacagggtgagcaaaaaagaggcagatgagaaggataaaagacagggacagcgagaaacaggcccagggaagagggaggaagagggaacagaacacggaagggagcgagaagcagacaaatgaaaaaggacgcgggacgtcagagtgagaactagaaacagaggcagagaggaagcaggagtgaccgagtgtgggagagaaaagggagggaggccctgggggagggtgggggcaggtggggagggtgggggcaggtagggaggaggggaggcctgagagcggctcagctgcagctggggctgtggtgcgggctccccaggggcaggtggcctggcctgaagtccaaggtcgaggcccccttcccttcccagcaccctcccgcgcgtttctcgccccgcctcctccttcctcctccctcagttgccccacccagctcccgctgaaaccagcccttccctgtgtctctccagagtggagggatatcctgtggggcggggagctggacagagggagaggcgccccctcccaggcacacaagttggggataaagcccttcctttactctggggcctcccttaggtccatctgggtgtgtgtttagtagggatgagggagcggtgaggtagagacccagagagagagagatgggtagagagatggagggtgagacacagtgacagagatgccgcagagagactcagagacagacagagacaggggagatgcagagacaaggagacagaggagagagaggaagacagagaccagaacacagtcacacagagacacaagcagaaccagatcccaagagacccaggcagccttggagaggggtgtccagcccagctctgccctgccaggcgacctgcgccagagccttcctctctgcctcagccccccagtcttgcctgaggttatccaaggggaatgccactggcctgtcaatcctgtggcagcatagatgccctcctcccagaccccaggcccctactcactcgctgatgcaatgagcagctgtgagcacccactggcggtgcaccaggatgcccccacactggaaagtgctgaaatggtacagagccgcctgccagggctgggaatgctgctcacactcccagcctcccacaatccgggactgaatcgggggcgcagcacctgcagaggcggtgctgggtcaggaagggcagggttggcaggagaggccagggacaaggctaggagagggagctgggctgtgggtctgaagggacattgcgggtagaggaccagggctggaggttggggacatgggcaaggggtgttgggaaggggtgggactctggactgttccctgggcttttggagtggtggctggacctggtggggagattttgtgctctgacagtagagcagcctccagggatcagggtaggagacaggagacagtgtctggagcagacactgcatctgggcgtcaggtcatttggggtctggggctgggggatgggaggtggtgggttaggggagtggaaagggattctggaaaccagggatcaaggcgccaagggtgggacaggatcagaggctcactgaggaagaatctggagggctaaggggctcctaggctagggaaacaggacctgggttgggcttttgaggttcaggaaaggatgcagctttagggaaccaggtctgagaggtaaagaagagcatctggactgaagagtttgggggtgacttggggtccctacattggggttggaaggggccagcttggctgggacagttagatttcagggcttcctggttaaagggtaaaagaaagggctatggttaaggctagaggtgggcttccgagaggttttggggtccttcctgtgaaccaggaatggcaatctgaggggaggttggggccctgagaacacagttgcggtcaggactgggacggggctcaggaggagggaggcgtgagtggcagtccttctcggacagggtgaaggatgggatcttcgtttctcatggggatggggttcatggtctgagggtactggaaggatatggggtcctcttggaggcaatcctaggaagaggattggagaagtggtgagaacaggcgccaagcagctgtgggaatgcaatgcaggacccacttgacgtgaggttgtagaatcacatactgacttgggggaggccagggcagaagcgctggctgagaaggcattcaggatccttggggtggggttccagaaaaccagagctgtgtaggaacaattcaggcagagaagggctggggcctggggcgggatggaacttccccaaggaaaggagcatgtggtgggagggtgtggtgtttttcctgggagagctgggggtgctgggtgggaagggacatttgcagacccccccccataccagatgggggatcccacatgccagtttgggaagcagggttttctggtgaaatttgggggaccctggaaggactggggagaccagatgtcagggtctggaggacacagttgagagcggacagctggatggaaaaagtcactggagtgtggtgggatttgtagactcaggagccaaataggtggccgcagggaactagggggcaggaggggatgatcagagtcctgtggggtgggggaagcccatgggagggttggggtcctccagagagagacagagatggcccagaatctgcccctttggtaaagcggtgggacagggcgttggctagggaagaggagaaagtactgaggcttcctgggaggagcaggaatctggtgtgggagtgagcactatgacaacatggaggagcgggggtggaagtttagggtggggccgcgcaagatagataagagccggggcaccccggactaggatagactgtgggccagagggatgagggtggggtgttggaggggaaggtcttatcggggggggatgtgaggccagcaagagaatcagggcccgttccccctcccacatccccccactgtctcaccagtcccccccagggacagggcgaggcacagaaccaggaaccacatggtgacagaggtgtccaggggccagcaggtggaggaactggggaacctccctggggaggcttttaaaagcccttatcccctcagagccccacccctgccctgctggcacccagatgttggccaaggcccttcccctgttgcctgggggctggacaattgccccccccccctccgatccccagagctgtagacggggagggagaaccagcacctgttctgcaggccctggatcacgctggacgcattcctggggttgaagccaggtggggcagggcctgtggctctggggctttgctctggggagcagccagtgaggcaaggggggactgaggggaagcagaaacaggaagacggaggaatcagtgacccctggtacaaagccccatatacctcagtctcaattaaggccctgcacccccagacctggtgccctcaaacaccagcagttagggctctgattccctgcaccactcggagccaagatactagcatctcagctgccagttccccctgaaatataagccttggccttcagaatgccctggttcttgcactcccagacccaggacctaggtccccaaagctactgttcctttcataataaaattttggggtacacatcaccacattcctagtgcctccagatccaggaatgtgaagtttcaggggtctcccagggtaagttctttagcattacaaaatccagtgtccctcccaaacaatgctggggtctcaatgagcctcccacttcttgctcccagttatgggtgctcaacgtcctgtcctccaaagtcccagagatctggacaaccttccctcccaggtcaagatcaggctaaccacagattccaatgacccttcccccccaccaccagtacaatatttaggtctcacgagccaggttcatgtacttcaacattcagcgaccttgaacatcacattttgtggtctctgaagataattaggaactagattcctgcagcctcaatggtaaacccataggcttccaacaggttgtcttggctttttggtaaaatcaaagcagctcagagttccagcctctgctgtatatcagggacctggctaaggaaaggacagtatttgcctttttgccatggctaccaggaagcccagaactaaatctttttttttttttttttttttctgagatggagtcttgctctgtcaccaggctggagtgcagtggcgcgatctcggctcactgcaactcctgcctcctaagttcaagcgatcctcccacatcaccctcccaagtagctaggattacagtcgtgtgccaccacgcccggctaaatttttttagtatttttagtagagatggggtttcaccatgttggccaggctggtcttgcactcctgacctcaagtgagccgcccgccttggcctcccaaagtgctgggattacaggtgtgagccaccatgcccggcccagaactaaaccttaaagaaaaagccattcttggtaatctagtgtctgttaggtcctttaactgggatccagagatagagggtatttactcagtgccagacacgattttaatcagttcagacgaatcatctcatttaatcctcacaacagccctttgaagtcagcaataagatggtctcattttacagataaggaaaccaaggcgaagtgagattgggcctcttgttcaagatcacacgggtggtcatgtgtgttgaatgaatggagccctgcttcaagccgcttctcctcacctagggatcggggtggtgggtgaaaaggaacagtgtacagtgtctcggggtttctctttgaccccagaaaaaagtcacagaaattcctacagagcaacttggatcagcgctttgttatcttggcattaaacaggtgaccttgagcgccagctttgtcctcaggtgggacaagtccttggctaacatctgggccttggacagggtcttgggggatggctccgttctgttccatgtcaggcggggctgctggccagctgtgggggcttctgctcagtcaggggcacaggagataggctagaatagtcagttcctcttcatggtttccctgatccactccaagtagtggcagactttggtatagacaccaggcttggtggtgttgtcacaagggacgtcaccccaggacacaatgccctgcaggatgcccccacagaccaggggtcccccagagtcaccctgtggggaaaagagggggtctcaggttgagtgaaacctcctggattcatcctcatcctaatcaccatttgcaatctcaccccaaacccaatccatccccatcccagggaaccccaacccaactcaactcaatacagcccagtttatcccaaacagagccaacccaaccccaaccccaaccccaattcaacacagctcaatacaactcacccaacctatatccaatctcacccccatgcaactccagtgcaactgtactaagttaaatccaactcagcccacatcctcaccattcaaaatcaaatcaaacccatgcccatctcaaaatccaatctcaatcttcatgtcttctgcattccaaacaaaatctacctcatcccaattcaaccctgacgtatttcccacccagaatcaaaccaaaccattcccattctcaaccccaacccatgccatctcaaactaactatcacattatccacctcaaacaacgcaatccccacctataaccccaactccaacctcacccctattctaacttctcttcctactccatctccaagcctaaccctagcatcttctctggcccaaagcaaagaaaatccaaccccatccggactcccacacctgtccccatccctcttcttccgcctgatggcccctctaggctctgacctcacaggattctgcgcctctgccctccgcgcctgcacacaccatggtgtttgtcaggcgccctgggtagctcttgtcacaagatgtgtccgagataatgctgatgttggcacaatgcaacgtatctgggagactcactggggaagacagtggacttggagcagatccataaattccggcccttgtcccctccgcccaagagccctggagcataggattccttgaggcctcgcatccagctccatcctttcacgcaccttgtgaccgggggctcccagcggtcccaggctcgttgtgggacaccaggccccagccagacaccacacaggcctcccccgggtgggggcaacgcgtgggtagcaccgcggggcgcacctgggggttcaggcgtgcgggctggactaggcgcagcaacatgatgtcgttgcggtggctgcgcgcttcgtagcgcgggtgtggaatgacccgagacgtggtccgtagttgctctgggccatcgcgcttgcgcaggttgtgctctcccaggcgcactctcatgaagctgtgcgggcgagtggttttcccgccagtggagtgcgggccagtggttacccgcaagtagaggacagaaagatcaaagagtgggcaacccgaggtctcccgaccctttagaaatctcgacatcccattaccttttcccaagaccctgaagccaatggttccagcccctgctcctcaaggaccaacgagtctgaagtcaggcacactcctagaactcgatcccctccaactactcccagccccctcctggtctgtccccgaatccaggattctcacatccctagaactgaggctcaaaagctggaactagtcttctccttcctccttcagagatcgaaggctttgaaacacacactccttcctaacccaggggcttgacatccggcctcctcgtctttcagaacccaggagttctggcgtctgcctccgtcttcccccaaatctaggagctcttccccccgaaccaggctccctcaggaccctgagcccctgccttcataccggctttggcagtgggccgcagacagcacccagtgtggggagatgagggaagcgccacagttaaagcgtccacgctcgtagagagccacttgccatggctgggagtggggtgcacactcgtcaccttccagcaacttgtcaccatcctgggctgctaagagaaggggtagaggatgcctgaggacagggacgtttacattgcctcctacaccttccttgcaccctgccctaactactatatgcctatgcctttcccctaacttctcaagacaccctgccctgtttttgtttgttgttgttgttgtttttgagacggagtctcactcttttgcccaggctggagtgcagtggcatgatctcagctcactgcaacttccgcctcctgggttcaagtgatcctcctgcctcagcctcccgagtagctgaggtgcccgccaccacacctggctaatttttgtatttttagtagagacgaggtctcaccatgttagccagggtagtctcaaacttctgacttcaaatgctctgcccgcctcagcctcccaaagtgctgggattacaggtgtgagccaccatgctccgcctgccctgttgtttatttacaaccgctgcctgttttctccagaactctagcccccaccccatttgctataagactctgggagagagaggaaggggaacagaccagagggcaagaagtcctctgtggttgggggtggagacaggggcactggatacaggttcagacaggtggtcacttgaaaccagtcattcacggtcaccaaattgtcacagacgtcaaacgcatgtggccactcagtatgtgtgacccagccttggccccagagtctggacatgtcagccaaattcagtgtgcagtatgagtcccagatgtggctatacaaggtcatggacatgcatacatgcacatccagcttccacacttaggtacagctatggacaggactggaagctgaaattcacttgcatgcacatgggttgcagcttcaagaatcacagcacaggctgggcacggtggctcatgcctgtaatcccagcactttgggaggccgaggcgggtggatcacctgaggtcaggagttcgagaccagcctggccaatatggggaaaccctgtctctaacaaaaatacaaaaaattagctgggcatggtggcgggtgcctgtaatcccagctactctggaggctgaggcaggaaaatcgcttgaacccgggaggcggagattgcagtgagcggaggttgctccattgcactccagcctgggtgacaagagtgaaactccatctcaaaaaaaaaaaaaaaaaaaaaaaaagaatcacagcacagatgttcatatgtgtatatgaatatggatggttaagacatgaatacatacacacacacacatgcacacacaaacacacacacagaattggatattgttcagacctaaattcaacatctctagtgtgagtcttggcatccagtgtcacagacacttgcatacagggtctggacaaagatgggtccttaagcctgggttcgaatgtactagctgtgaaactttgagtaagttattcgacctgtctgtgcctctgtttcctcatctgtaaaatgaagattgttgtaaggatgaggtaggaatgtgtatgtgtgtgtgtgcatgtgtgtatgtatggtgagtgatacctagccctggtagctacttaataatattagttgttttttgcaaatgacacctggatttagtcacagggacatacgtgtgaaagttcaggtccatcctggagatggccaacataagtcagacatctgcacagaattacctataataaatagtcaaggttggccaggtgtggtggctcacgcctgtaatcccagcactttgggaggccaaggccgaggtgggtggatcacctgaggtcaggagtttgagaccagcctggccaacatcgtgaaatcccgtctctactaaaaaataaataaataaataaataaaaatacaaaaatcagctgggcgtggtggtgcgtgcctgtaattctagctactcgggaggcagagacagaattgcttgaacctgggaggcggaggttgcagtgagctgaggttgcaccactgaactccagcttgggcggcagagcgagactccgtctcaaaaaaaaccaaacaaacaaaaaaaagtcaaggttaaaaccgtgattcacccacaagacattttgtagagttagagctgcagacaccaacccagaaggccaacactcagatgtggacttgctgtctggggcagcacccagacacggggctgggcattcaaggtcaaagacatgcagctgaagccagaggcagccagggcaggacatatttatccatctctagatcagcccccaagccagatctgtggagtcactgattgggtttcacatatggggatctggctcatgcatgtggagaggatgtgaacatacagggccttgtatacccactgcacacgtgcatgtacacacacacacacacacacacacacagaatggcattatgcttaaggacatgattagagacattcaaggtcacaggaccaggacccctctccactgggcaatgtggatgcatcccctgaaggttgaagccatgcacactcccacccacacaggggcaggatttgcacagccagaccaaatgcccacactctccccatcacagtcaggaactgggccaaaggcccccgtgagaccaggggaatgcggatgtggtggacaaggggcttaacaaaggaagggtgaggtcgtcctccgaagggcggagggtacgggctgaacagctgggcaccgaggctgcacctggccagtccaagccagaggaaggtggaggccccagctgggcgcagcaggcaggcgcgaggcaggtaggtgagtgcacagagagagccggaggggaggctggaggcgtgggggtctcaggggcccccaggagtgagggtcatttgtggcagaacgttaatgaaagtccaccccccaatttctccagaagagaggcatcaggttacaattaatttcttggtgtgtggcagctgagttcaatctggagtttgcctgacacccaaggtgaccttgatgttgtggccgtccctctgagccacagccccttcccttgtcaaatgaggtcggtggtgcccaccacacatagacgttgtatgtaagctctaagcaccgtgcctggcttgcacacctgaaggggcactacctgggccaggcttatgcttctgcctcacacacaaccacatttaatcccctcaaagaccctgtaagagacagggagtggcaggtgtgggactcaagctggagtctgtctgtgctgttggcctctcagcacttgtctaatgcttgctatgtatattacctctgttatgctattgagacctcactgttattgtctcaagtgggtgctgtcttatagagaaggcattcgaagcccagagaggtgaagcagttccctcaaggacacacagcaaggaagcggttgccccaggactcagctcaggtttgtgtaaccccaggaccgtgttccttgtcgtgggcagcgagaggccccaggcaacatagcgactccagagcagcagcaccagcacctgacggtaagggcttagggacattggcacaggtggagggtgaaggaaggatctttagtggtctctgggtgaggtaggggctggcagatcactgggcccagacatgcttgggaagggggcacctgctcccacagacctggccccctcctggggccacctcacctgtggatgccagcaggaaggagagagtgaggagaagccacattgtggaggagggaccagggttcggctgcagtctggggagggagtgagagaatccaggtgaggcaggacccttctgcctccaccaggatccctccagacacagacttatcccatccactgttaataaatttcttctgaccaccggtatccccttcccccaaccccactctgcgcttccttctgggtcccccatctctggaaggtttactcttcctctaggcactcggacagaccctgccccacctcctccacctgtcagcctccagcaccatgctaccagcccctggatctctctccatcatcaccaaggacccctgtcccaacttttttttttttttgagacggagtctcactctgtcacccaggctggagtgcagtggcacaatgtcggctcactgcaagctccacctcccaggttcacaccattctcccgcctcagcctcccgagtagctgggactacaggcgcccaccaccgtgcccggctaattttttggaaattttttttttttaagtagagacagggtttcaccgtgttagccaggatggcctcaatctcttgacttcatgatccacccacctcggcctcccaaagtgctgggattacaggcatgagccaccgcgcctggtctatctcaaccctcttatctggccttttgggtccccctccagtccagtcccctccaccagcttgccctccagccatgaccccaaagggtctttctacatctggagctggctgtgcccctcccctgctcaccaccctccatggatccttggcaccaccaggataaagtccagctcttcaaattcactttctttctttttttttcttttttttttttttttttgagacggagtctggctctgtagcccaggttggagtggagtggcgtgatctccgctcactgtaacctctgccttctgggttcaagagattctcctgcctcagcctcccaagcaattgggattacaggtgtgtgccaccacgcccagctaatttttgtaattttagtagagacggagtttcaccatgttggccaggctggtcttgaactcctgacctctagtgatccacccgcctcagcctcccaaagtgctgggattacaggcatgagttgcctggctccagcctcactttcaaggacaaaagtggcttcttcccttccagcccctctccctgggtctcccatgaccttgtcctagacgcagccagtgctgccattttccctcctgccatttcatgcttaggctattcctcccaccgcatatccaacgccattcccttccagccccgcttcctccttgaggccttctctgacctcccctgaccctcagtggtgtctgcctcccctacgagactggcagctccccgaggagctggtctgactccactctgggtctccagtactgcagggcccgacccacgggaggcctcaggaagctttgagggtgaattgaaatccttcttccccatatcttccaaattcatctttgtcctctgacactctgcccccacctcttctgggaggccccaacacctaacaggtgtctcccctgaatcccacagcacccattctgtctccattacagcgcagatgccccatacttgctgaggtctggcctgttcttttctccatctgggggtcttgaagatggggctcaggtcaggttctttctgtgacctcagcactgccccacctggggcctggtacacaggaggcctccgggaggttgtgctgaactgacttgaacccgtgatcactcctgaccacgttcttggctctgatacaagtacttcagggacgtcctcctgatccactccatccccctccctccccaccactgcagctccttctggccattccaggacattttcttggttcaggttcaatttggggcattggtaaaggacacgtggatctacccatgcccttgacactcagttctccaagcgtggtcaacgtttccccttgaaaccagggcacagtgaatctcccctttgcccctccctcagtcttgtctcaaagctctcacctcctccagatcctccagcagcatctagggcagcttgggtgccagaagggagcaggtaccaggatgcctgaatttataagctcccagtcccagctgggtctgggggtgtggtggtgtagggtggggtgggaggtggctgagagtcaggtttacaggcagagacgccttggttgctggtggggtgggagacttggcctaatgagcatttattaggttgaagctgttgtctgagtccacaaagaggaattctccaccaggagcagttcctcaagggggaggggacaggaggacaaaaacagaaattaggaggagatcaaaagacagagtctggaatttggggtctggagtgtggaaactggatcctaaagtccctgttcttgggcttggggcagagttctggatcccgggttctggatccggatctggttctggatctgggtcttggattctggatttgaggatcttgagttggagattaatgacctgcagtctggaatatggatttcaaagtctgagttcttgggctgggggtctggaatctggatcctggagtcgggcctttgagtgacagatcgtgaaccttgattctggatcccggggcattcgaatctagaacccacaataggagcctggaatctggtgtttggaatctggcaatcgaggctggaaacctttgcacctgctatgagaagcctggggcctagactacaaatggtagatttgggattttgaattgtggggtctggattctttttttttttttttctgagatgaagtttcgctcttgtcacccaggctggagtgcaatagcgtgatctcagatcactgcaacctccacttcctgggctcaatagattctcctgcctcagcctcctgagtagctgggattacaggcgaccaccaccacgcccagctaatttttatatttttagtagagacagggtttcaccatgttggccaggctggtgtcgaactcctcatctcaagtgatccacctgactcagcctcctaaagtgctgggattacaggcgtgagacaccatgccaggcttggggtctggattctacagggtggatctagcctctgagctttcaggagtagactttggaacatacagtctggagtttcaaatctgtttttgcattgaaaacctggactgtggctgggcccagtgactcatgcctttgggaggctgaggtaggaggattgctggaactgaagggtttgagaccagcctgggcaacacagcaatacctcatctctatgaaaaatctaaataaataaataaataagtaaataaatttttaaaaggctgaattgagagacagggacctggctttcacgattctgagattgctagaatcttgactctagagtctgaatttagagtctgggaacccagggtctctattctggtcctgtagtcttatttctgggttctagagcttgaaatctggattctgcatcccagaggctggagatgatcactgagatgacccaaggctttgggtatttgaggctggcttccaatgtctcagaaccccagagggccccaagcaattatctagagtctattttggcttaattaatgaggaggtcccaagacaggagggactgacctcactcaggtcacccagtgaaggatgggacctgttgtaagcgtggtctctccccatgtgtggaaagtcatcatctttatgggaaggattcagccattctagaactacaggcccctggaatttctagaatatcagactttcagattctaaaagcacaggccctaagacattctggcagtggaggacactctggaaggtaagattttagaatagcctagaaccacagagctccaaacactctagaaccttcgaacatcgggcactctggagtccccagaaacctcatgcattctagaacgtcgggtctccagacattctacaagcccagaccggcagacataatagatccccaggttggaagctattctagaactcctatgtccctttgcctccctccccacaaattgatgctcaaagtctgcgggcctcaccctgggccaccgcttcagctgagcagccctgtttatggaatgcggctgcaggccactcctccgtgccaagtgctctctttgtaggatctcactccggctcccggcagccctgtgaggtgtttatattaataaccttatggcttcctgctgaatacggaggaaactgaggcccagacaggaggcagcacaagcaaggttcctgcagaagcgagaggccacgcgggagaggaatcagtgttccgactccggaacgcccggtgggccctttcgccgccacccctgcagccgcctccctctgttggggcgcggtggtgacgagggaaaggagccgagcccctgggacttcctcggtgccaggtctgtgctgagcgcttcccgtcacgatcgcacgtgctcctcctcctaaccagcctaggcaggtactgatgaagcacccctgatacagacggggacactgagggcgctcccgccgcgccgaacccaggcgcgcacccggtctgcgctcggctccctggagggcgcgcagccagcggctcccgcagccccgcccccacgcggtgacgtcggcgccccgtccccgcccactgtgtctggctcaggctcgcgcgatcgatgtcctcctggacgtgtccgcggacgtccttcacctccaccgcggcctgggtcccgcccaccgcggcctgagtctcacttttgcccggctcctcctcctgagaacgttccctgggagtttttcatcaactcccgtggttcatccaccaaccacgcaggtctcctccatctgaccctgaactccggcttgggcagccacctgctcctgggcgccccctgcaccactgtccctaggcccctctcacttaccgagtcccaactcattgctctatttccccaaaccctccttccctgttcttccacgttcttcatctcaggggcagcgtcaccgaccacccagttattcggccagacgcccttggcactgaccttgccccatctctccccttatcccctacagcccatcggtccccagccttgtcccttcggcccctgcctctctctgccccgtcccctcctctctgtccccttggcctggctccagctcagacgtcctcctctctctctggaccctcgctcctcctgtccgggaggacagcctcctgtcggtcaccacgtggccctagagggtctctctgcacttggagatcaccccgcccctcccctgctcacagccttcccttgcagctccccatcacccctgggcaaggtcccggcttctcggtctgcagttttaagccctttgagattccccagcaggaaaaagcctcccctcaaacccccttctcagggggcctgcagactgcccacctccggagcgggactggactcgtggtgcccgaagggcctccccatgaggtgctggccctcttctaacttagtctcaccacggcctccgttccttctggaaccagacaagctgctgtttcagggcgctgggtctggatccagacagcatgggtgcagatctctgttccactacttactattttgggagaccctggtaagagttttttcttctctgtgtctcagtttcttatccttaaaatcagaggatcccctcgtagagtttttcgaggagtaacgacttagtttgtgttaggagctcagagcatatagtaaattatgacgattcattcatttaacacatgagcagacgggagtgcgggggtcactggtgaaggtcacccaggctgcagaagtggaatcaagagaatggttctcggggtcctggtgccccttgtgagaagcatcagctctctgggtgtcaggtgctcatctgcgaaggggtcttccgttgcggtggggtggaaatgggagggacctcacaggggttggatgaggtcatacccatggagcaggtgtgcgaatcataaaatcaggctgaggcttgcaagaccggttaacacggcacgtgattcagatgtagccgctggagccaggtggcccgggtttgagttctgcctctgtcccataatactgtgcaccctcaggcaagtcacttagcctctctgtgcctcagctgcctcaactataaagtgggggtaataattgctcctccctcttctgtgggagtgttttgaggtgttcattcttgaaatctgtgcccggcactgagtgagtgctgggccattatcagtctgtcctattacccttgggaactgaaagctggggagggatggttatgtggggtctttctcagatgacacagttgggtagcagcagatttggcactggaagaagccactgtgctttttgttttgttttgttttctgttttttgtttttttttttttttgagacggagtctcgctcttgttgtccaggctggagtgcaatggcatgatcttggctcactgcaacctccgcctcctgggttcaagcgattctcctgcctcagcctcctgagtagctgggattacaggcacccaccagcacagccggctaatttttgtatttttagtagagttggggtttcacagtgttggccaggctggtcttgaactcctgacctcaagtgatccacctgccttggcctcccaaagtgttaggattacaggcgtgagccaccgcgcccagccagaagccactgttttgatctcccagatgtggtatctttttctgaatccctgtgacccctttatcaagacccctgttttacagatgggggaactgaggcccagggagaggaaatggaggtgtgagaccctggtatgagagtgtgacgtcaagcaaagagaatgtcacacgcagacgagttcttctctgagactttatttcctgggctgtgctgggggaagctggaggggaggaggcagaaaaacccacatcttctcttcttttgtcctgggagggccttaccgataggtggcatcaattgtgcgtttgttcatagcagttttactcctgggtctgagggaggaggggctgggggcctggactcctgggtctgaggagggagaggctggtgcctggactcctgggtctgagaaaggagaggctgggggccgggactcctgggactgagggacgggtggctggtgtccaggactcctgggtctcaaggaagaagggctggggggtctgagggaggagggggctggggactcagactcttgggtccaagggaggagcggctggggtctggactcctgggtctgagggaggtgggactgagggcccggactcctgggtttgagggagaaaggcctgggggatctgagggaggaggggctagggtctgaactcctgagtctgagggaggtggggctgagggcctgcactcctgggtctgagagaggaggggctggggggtctgagggaggaggaggctggggggtttgagggaggtagggctggagtctggactcctgggtctgagggaggaggggctgggggcccgcactcctgggtctgagggagctggggctggggaggtctgagagaggtggggctggggggtttaagggaggtggggctggagtctggactcctgggtctgagggaggaggaggctagggacccggactcctgggtcggtgggaggaggggctggggcatcttagggaggtggggctggggcctggactcctgggtcctgcactctggggctgggagagaaaggcctgccctgcctgcgtctccctctctgtgttccacccccacccatagacctcttcgctagagtcctgagcccccagcccactttccagctccctcctcttccctttctggaagcttcccttctgcgtttgttcataggaggtttgctcttgggtctgagggaggaggggctggggtcctgagctcctgggtctaaaggaggaggggctggggagtctgagggaggagggaggtggaggcccagactcctgggtctgagggaggagaagctggtgcctggactcctgggtctgagagaggagaggctgggatctgggactcctgggtctgagggaggaggggctggggtcctggactcctgggtctgaaggaggaggggctggggggtctgagggaggagggagctggggagacgtgtgtcttctccctcccgtgactcctgctcactttccccatgtctgtgtttctgctcccctctccccgtgatcctgtcagcttcttttagtttttattttttagagttggggtcttgctctgttgcccaggctggagtgcaatggtgcaatcatagctcactgctacctcaaactcctgggtttaagcgatcctctggtatcagcctcccgagtagctgggactacaagtgtgtgccaccatacctggctaatttttacgttttgtttttttttttgtggagatggggtcttgatatgttgcccaggctgagattgtaaaaagtcatcatggaacaccccacctcccagtgcaggaaagctggctgtggtattgccaagaatgatgtttattgcagcactattcccaatagctaagatttagagacaacctaagtgtccatcaacaaatgaatggatacagaaaatgtggtacatatacacagtggaacactattcagccatcagaaagaatgagagcctgtcatttgcaacatggatggaactggaggttatgatgttaagtgcaataagtcaggcacagaagataaacttcacaggttctcatttatttttgggagctaaaaattgaaacaattagccgggcactcacacctgtaatcccagcactttgggaggctgaagcaggtggatcacctgaggtaaggagttcaagaccagcctggccaacatggtgaaaccctgtctccactaaaaatacaagaattagccaggcgcagtggcgcgtgcctgtattcccagctacttggaaggctgagacacagaagtgcttgaacctgggaggagggggttgtggtgagccaagacctctccagtgcactccagcgacctgggagacagagcgagactccatctccagaagcctggagaaatagggacaaaaaacaaaaacaaaaccaactgagttaatggagatagacagtagaagcatagttatcagaggctggggagggtgagggtatgtgggtagtggggaagtgcggatggttaatgggtacgaggaaatagaataagatctagtattcgatagcacaacagggtgactgtggtcaataataatttaattgtacatttaaaaacaacaaaaagaatataattagattgtttgtaacacaaagggtgaatgcttgaggtaatggataccccatttaccctcatgtgattattacacattatatgcctatattaaaatatctcatgtaccccataaatatatccacctgctatgtacccacaacaattacaaattagcaaaaaaagaataatgtggctcttgccaggtttcagctccacccttgctgtgtgtgtggcgcgttgcgtccccaggtccctctcagtggtccgtggagagcattaccacctgtcactgtctactatctcagggcagaccctctctcctctctcttcctccatctctgcaccccacaaataaagtggcaacccccccgatgtgtgtctttgcagaacctgaatgtgatgagattgccagaaaatgccagtgtgcccctggatgggtggaggagggtggggcgggtggaggggacaactttgccccattggggaaccactgggctatacctgtcactgaagcttcctttctcccctgcacctgactccacacctcaggacgcaggtcaggagggctgggggatgctctagccttggccaggtgggcctggagatgattgttcactgcaggagcattcacctttttagatgggtgcttcctgtctagagaaggagacacggggagctggaaagagaagcctgcagaaatagggaccgggcaaaaacaaaggagggtggagtcggggagtgtagaagagataaagtaaggactggagtgaggaagaggcatcaaaagagggagggaatggtgaaggcagaaaaccgtgagaaacggggagtgagaagatagcatgagaaagacaggatcaagtcaggcgtggtggctcacgccggtaatcccagcactttgggaggctgaggcgggcggatcatttgaggtcaggagtttgagaccagcctagccaacattgtctctactaaaaatacaaaaattagccaggtgtggtggtgtgtgtctgtaatcccagctactcaagaggctgaggcaggagaatcgcttgaacccatggtggggtggaggttgcagtgagccgagatcgcaccactgtactccagcctgggtgacagagtgagactctgtctcaaaaacaaacaaacaagcaaacaaaaaaaccaggtaaactgaggctgggttttgtatcccagaccaaatgcctgcactttgaatgcctggttgggaagcctgagattatcctgtagggaagcatcgagagcatgaactgaatggtgttaggagacaattatccatggctctcttacctttctgcctgtctcctgaaaaaggtattagccacttttgagttccagattgtctttttatggatgtttctctagagcatcagagcatgtttgttcactgtcttagataataaagataatgtccttccataatgatttatttattggctaggatagtaaatacaacatgtccttccggggcaggtggatcagcagtccgacataacaaagataatatctctccgagtttcaaagtcaagcagatttccttgcatctcccttataagattgaagatttgtaaatacatgtaaacagaggttccccagcattgacgcaaaccactgtgtgcgcagcatctgcctgagccactctgatcatccctgtaggacctggggggcaaggtgagcccatgtgaacatgaatctcatgctgccggctgtgccatgagtaataaagtcctttgtctctgacccggagttgttgtgtgttctgccaatagtttcactggatacaaaattcttggctgataattgttttgtataaggaggctaaagacaggaccacaatcccttctaggttgtagggtttttgctgagaaatctgctgtcaatctaataggttttcctttataggttacctgatgctccttcatcttgactttagataacctgatgactatgtgcctaggggggtcatcttttttttgttttgttttgttttgagatggagtctcactctgttgcccaggctggagtgcagtggtgcgatttcggctcactgcaacgtccgcctcccgggttcaagagactcttccgcctcagcctcccgagtagctgggattacaggtgcgtgccaccacacccggctacttttttatatttttagtagagaaggggtttcactgtgttagccaggatggcctcgatctcctgaccttgtgattggcctgcctaagtctcttaaagttctgggattacaggcgtgaacgactacgcccgaccagtggtcatctttttgcaatgaatttcccaggcgttctttgagcttctcatgtttggatatctagatctctagcaaggccaaggaagattattcccctcaaatatgttttccaaacttttagatttatcttcttccttgggaacatgaattattcttaggttggttgtttaacataatcccaaacttcttggaggtcttgttcattttttaaaaatacttttttctttgtctttgttggattgggttaatccaaaagtcttgtctttgggctcttaagttctttcttctacttgtttgattctattgctgagactttccagtgtattttgcatttctctaagtgtgtccttcatttccagaaattgtaattgtttttgatttacgctatttctctggagatttttctgtccatatccggtaacactttttaaaatttctttaagttggtattcacctttctctggtgccttcttgagtagcttagtaattgatcttctgattttttttttttctggcaatttcagagatttctttttggtttggatccattgttggtgagctggtgtgatctttttggcgtgttaaataaccttgttttgtcgtattaccagaattggttttctggttccttctcctttgtagactatgtcagaaggaagatctgggtctcaagggctgctcagattctggatttagctacccagtggagcgtctgcgctctgggctggtactggggggtgtctgcaaagagtcctgtgatgtgattcatcttcaggtctcttagctgtggatatcagcacctgctccgttggaggtaacagaggagtaaagtagactcgctggggttccttggttgtattattttttagtgcgctggttttgtgttggttggcctccagccaggagacggcactttcaagacagcatcagctgcagtagtacagggaggaaaacagcttgccctagggttacctggataagtattcaggtttctcaggtggaggatggggccagatagcttccaagagagtatgtccttcgtctttggctactagggcaggtagaggaacaccatcaggtgggggcagggttaggggtgtctgagttcagactctccttgggtaagggtcgctgtggctgctgtgtgggggtggggtgtggttctcaggccaatgaggttatgttcccaggggaattatggctgcctctactgcatcatgtgggtcaccagggaagtgggagaaagccagcagtttcagggctcacccagctcccatgcagcccaaaaagctggtctcattcccactgtgtgcatccccaatcaatgcacagtttgtttgcaggcagcaggtgcgcagggctgggaactcgccccaggctacaagcctccctgctgagaaagcaagcagggctttcaggtttcgtgcctccccacctgctgcagcttctgtgctcatgtctgcactcacagttcaccccctcccctgagttctgtccaggaaacttcgtgttcagttgaaattgttgcaaagttcagctggaagcttccttctccctgtagtctttccccaattccgttggcagccctccccaaggacccctgtgagatgaagtcagaaatggcttccctggggaccaacagtaccctcagggctcttcctgctgctttctctaccccccgtatttcattcagctctctaagttcatctcggctccaggtaaggtcaaatccttctcccatgatctggaccttcagattccccagtgaggatgtgtgtgcaggggcggatgatccccccttcacacttttcacactttgagcactcacagtttttcagctgtctcctggagcctgcagcagcaatgtgcttccttcaaagggtctgtgggttctcttggctttcctggtatgttcctgcagtagttcttggagcaaaaattcaagacgtgagtctccacatgctgctctgtccatctgagtgggagctgcaagttagtcctgcttcctagccaccattttctccccacattagctttttgacttttctttatatatatatatatatatatatatatatatatatatatatatatatatatgtttgttttttttaattatactttaagttctagggtacatgtgcacaacgtgcaggtttgttacatatgtatacatgtgccatgttggtgtgctgcacccattaactcgtcatttacattagttatatctcctaatgctatccctccccccacttgacttttcttttttattaattgcctgttcatatgctttgtccatttttttaggggttgctctcttgttcatgtcagaagtttcttgtgccttctaaatggtgatctctttttggttttgaacattgtataagtcatcttttataaatagaaattctgaattcttatacaagtttctggatgacagtgccctctaagcaaaaattctaaattttcctataatgaagtacatccaaattttggtctatgatttgtgcttctgaagttgtgtcaagaagccttttctttgtgttagataacaaaggttatctctcatattttctagcctctctaaccctctctgtttgtccatctgtttctgtatctcatcccatctatatagctattcattaatttctcatttaactgatatttgctagttgtcacaactgtgacttgatgaagataacataaactcataataatatccctcaataagaaaaggaacgataaactagtgtcattagcttataaaccgtgttagattaattggtggatcagaacacttgaaatgtcctgaaatctttcagctgacatttgaaagaaacttactattatttctccccaaattgggcaagaatcctagacaaatcatatgaaatttaaataaataaaagctttgaagctgaaagaaatgtttctaaaggattaataatgaaaaacagattttgatcaaatatgataaaaatgaaattatttttcttcccctagaaaatgagattacaggccgggtgtggtggcttacacttgtaatcctagcactttgggaggccaaggtgagcggatcatgaggtcagtagttcaagatcagcctggccaacatggtgaaaccccgtttctgctaaaaaaaaaaatacaaaaattagccaggtgtggtggcatgcgcctgtagtcccagctgctcgggagactgaggcagaagaattgcttgaacccgggaggcagaggttgcagtaagccaagatcgcaccactgcactccagcctgggcgacagagcgagactctgtctaaaaaaaaaaaaaagaaaagaaaaagaaaatcagattacaaaatcatttgatgataagcagagataactgaagagtatgaggacaaaagaatgtaggagaagaactttataaggcatttaagacaattgctaaattaaaaaattccacatcttctaaattttgcattgattttggtactgtatactcttttgaatagttcccgtattattccttttatcatttagattcgctatttacatttgttatttcttttcccattagattaatctgggttatacctaagtttatattaagaatcttttattctttttttgtttttaagaagctgaagacctcagaaaacctgatcaacatgaaatatggtatgaagtagtactcaataaagagaaaacatgatggtaatcttgaagaaaagcaccatattcatctctgtatgtccttctgtgtccctctctgtccctgggggagggcctctctgaccatctcaggctgttatagtggagattctggaactctggagtggaaggattcctgagacctttctgggggtatgcgaggtcaaacactagtttcataataatctgtacacattatttacctttctcactcttttttttttttttttttttttttttctgagatggagtttcactcttgttgcccaggctggagtgcagtggcacaatctcagctcactgcaacctctgcctcccgggttcaagtgattctcctgcctcagcctcccaagtagctgggattacaggcgcccgccaccacgcctggctaatttttgtatttttagtagagacggagtttcaccatgttgtccaggctggtcttgaactcctgacctcagatgatccgcccgccttggcctgataaagtgctgggattacaggtgtgagccaccacgcctggcacctttctcactcttattctctcacaagcacaaggtggaattttccagagcctacatgctgtgatattgtagcaaattaaaccctgaagcagatatgagagtccagctgccttctattaagccagacattaaagagacttgcaaaagtgcataacattttttctcactagtttttttcttaaaatatagctatttttcattaaaatacattatgttaacatatttattattgttatttaaaaataaattaataactgaatattttaaagatttctcagttttaatatctactgtggtatcaatagatatagttaatataaacaaaaacccatgaaaggccttcagtaattcttttgttttgtttttttttttcgatggagttttgctcttgttacccagggtagagtgcagtggcacaatgttggctcactgcaacctttgccttcccggttaaggtgattctccagcctcagcctcctgagtagctgggattacaggtgcctgccatcacgcccggctaatttttgtatttttagtagagatggggtttcaccgtgttggccaggctggtctcaaactcctgacctcaggtgatctacctgctttagcctcccaaagtgctgggattgcaggcgtgagccaccatgcccggcccaataattcccttttttttttttttttttgagacggagtcttgctctgtcaccaggcaggagtgcagtggcacgatctcggctcactgcactctctgcctcccaggttcaagtgattatcctgcctcatcctcccgagtagctgggattactggtgtgtgccaccacacccagctaatttttttgtatttttagtagaaacaggatttcaccatgttggccaggatggtctcgatctcctgacctcgtgatctgccctcctcggcctcccaaagtactgggattacaggcgtgagccacagcgcctggccccagcccaataattcttaagagtgtaaacatgtcctgagatggcaaatgtttgagaaccaccgttctagacattttcctgaattctagagtgtgggagtgtagaacctggagcttggcttctggagcctagattctggaatttggagctgggatctgaggcttggctgcagcagtgtggggctggcttccggaacacagatctgacatgctcatctgctgcgtggggtttactatctgccttgaatcctaaagtctgcccctgaggagtctggaatctggaatctattatctttagttgaacacctgcagtctgcgttctgctttgcagagctggattctttacccgtgatccgttctggcatttcaacttcacacagaataggccacttcatggtactgttttcaaccaatcaagcaaattaatcgttagagccctttctaattcctctagttgcaatgttaaacccaatatttctgtgtagtgggtccatattaataaattcagcctgatctaaccttatattccttccaccattattccataccaacccttaatatgcattcccacatatatttcctggatttctgtctatataatgggcaatcccggctttgccagtttctagtgacctaacatctctgtgactcatgttattgtactttaaagtggaaataataacagttcctgtacagtttagggcttcccaagatgaccctccattgacatcagttgagattccaggagagtccaaaagatcatccttaaggttcagtcgtttgctaggatgctcatggttgtggtttattacagcaaaaggatacagatgaaaatctggcaagggagaggtgaatgaggcaaagacaaggagaactcaaagtgcgaagcttctagttttcttttcccggtgacatcgtggaaagcactagcatctctaagcaatgatctgtgacaatattcacagtgtattgccatccagggaactcaactgagccttgatgtccagagatttttgtgtttttttctgagactgagtctcgctctgtgcccaggctggagtgcagtggtgcaaccttggctcactgcaagctccgcctcctgggttcacgccattctcctgcctcagcctcctgagtagctgggactacaggcacccgccaccacgcctggctaatttttttgtatttttagtagagatggggtttcactgtgttagccaggatggtctcagtctcctgacctcgtgatctgcccaccttggcctcccaaagtgctgggattacaggcgtgagccactgcgcctggccgatatccagagattttttggggggctccatcacacagacatgttgactgtcttcatggttgacttttagtatccagcccctctagaaatctagctgatatagtgtggctcaaaaccttcagcacaaatcacaccgttagactatctggtgtggcccaaaccttcaggtgaacaaaggcactctaaactggcaggatattccaaagcattagagatgacctcttgcaaagaaaaagaaatggaaaagaaaaagaaagaaaggaaaaaaaaaaaaaaaaagagatgacctctcaggctctgaggggaaacgcctgaggtctttgagcaaggtcagtcctctgttgcacagtctccctcacagggtcattgtgacgatcaaatgtggtcacgtgtatgaggcaccagcacatgcctggctctggggagtgccgtgtaagtgtatgcttgcactgctgaatggctgggatgtgtcagggattatcttcagcacttacagatgctcatctcatcctcacagcatcactatgggatgggtattactggcctcatttgatggagaaactggctgtggctcagaaaggggggaccactagaccagggacactctggatgctggggactccagagaccatgaccactcaccaactgcagagaaattaattgtggcctgatgtccctgtcctggagagggtggaggtggaccttcactaacctcctaccttgaccctctcttttagggctctttctgacctccaccatgatactaggaccccattgtattctgtaccctcttgactctatgacccccactgcccactgcatccagctgggtcccctcctatctctattcccagctggccagtgcagtctcagtgcccacctgtttgtcagtaactctgaaggggctgacattttactgacttgcaaacaaataagctaactttccagagttttgtgaatgctggcagagtccatgagactcctgagtcagaggcaaaggcttttactgctcacagcttagcagacagcatgaggttcatgttcacattagtacaccttgccccccccaaatcttgtagggtgaccagagcagtctaggtggatgctgtgcacacggggtttgtgccactggtgagaaacctgagattaggaatcctcaatcttatactgggacaacttgcaaacctgctcagcctttgtctctgatgaagatattatcttcatgatcttggattgaaaacagacctactctggaggaacatattgtatcgattgtccttgacagtaaacaaatctgttgtaagagacattatctttattatctaggacagtaagcaagcctggatctgagagagatatcatcttgcaaggatgcctgctttacaaacatccttgaaacaacaatccagaaaaaaaaaggtgttgctgtctttgctcagaagacacacagatacgtgacagaaccatggagaattgcctcccaacactgttcagccagagccttccacccttgtctgcaggacagtctcaacgttccaccattaaatacttcttctgtcacatcctgcttatttatgcctaaccaaggttctaggtcccgatcgactgtgtctggcagcactccactgccaaacccagaataaggcagcgctcaggatcccgaaggggcatggctggggatcagaacttctgggtttgagtgaggagtgggtccaccctcttgaatttcaaaggaggaagaggctggatgtgaaggaactgggggagggaaagtgtcagttccgaactcttaggtcaatgagggaggagactggtaaggtcccagctcccgaggtactgatgtgggaatggcctaagaatctcatatcctcaggaagaaggtgctggaatcctgaggggtagagttctgggtatatttgtggcttaaggctctttggcccctgaagggcagaggctggaaccattaggtccagggtttggggtgatagtaatgggatctcttgattcctcaagagtctgaggatcgagggttgcccattcttccatcttgccacctaatccttactccacttgagggtatcaccagcccttctagctccatgaaggtgcccctgggcaagcacaatctgagcatgaaagatgccccagaggccttgggtgtcatccactcatcatccagcatccacactctgagggtgtggccagcaccatgacgtcatgttgctgtgactatccctgcagcgtgcctctccagccacctgccaaccgtagagctgccgacatcctcctctggtgggagtggcctgcatggtgccaggctgaggcctagtgtcagacagggagcctggaatcatagggatccaggactcaaaagtgctagagaatggccatatgtcaccatccatgaaatctcaagggcttctgggtggagggcacagggacctgaacttatgggttttccccaagtctattgctctcccaagtgagtctcccagatacgaggcactgtgccagcatcagccttatctccaccacatcttgtaaaagggactacccagggccctgatgaacaccatggtgtgtacaggagtagggggtggaggcacggactcctgtgaggtcacagccaagggagcatcatcatgggtggggaggaggcaatggacaggcttgagaacggggatgtggttgtatttggttttctttggttagataaagtgctgggtataggattgagagtggagtatgaagaccagttaggatggaggatcagattggagttgggttagagatggggtaaaattgtgcttcggatgagtttgggattgacactgtggaggtggtttgggatggcatggctttgggatggaaatagatttgttttgatgttggctcagacatccttggggattgaactggggatgaagctgggtttgattttggaggtagaagacgtggaagtagctgtcagatttgacagtggccatgagttttgtttgatggggaatcaaacaatgggggaagacataagggttggcttgttaggttaagttgcgttgggttgatggggtcggggctgtgtataatgcagttggattggtttgtattaaattgggttgggtcaggttttggttgaggatgagttgaggatatgcttggggacaccggatccatgaggttctcactggagtggagacaaacttcctttccaggatgaatccggggaagccttaattcacgtgtaggggaggtcaggccactggctaagtatatccttccactccagctctaagatggtcttaaattgtgattatctatatccacctctgtctccctcactgtgcttggagtttacctgatcactcaactagaaacaggggaagattttatcaaattctttttttttttttttttttttttgagacagagtctcactctgttgcccaggctggagtgcagtggcgcagtctcggctcactgcaacctctgcctcccaggttcaagtgattctcctgcctcagcctcctgagttgctgggattacaggcatgcagcaccatgcccagctaatttttgtatttttagtagagatggggtttcaccaatgtttgccaggctggcctcgaactcctgacctggtgatccacctgcctcagcctcccaaagtgctgggattacaggcgtcagccaccgcgcccagccacttttgtcaaattcttgagacacagctcgggctggatcaagtgagctactctggttttattgaacagctgaaataaccaactttttggaaattgatgaaatcttacggagttaacagtggaggtaccagggctcttaagagttcccgattctcttctgagactacaaattgtgattttgcatgccaccttaatctttttttttttttttttaaatcgaggtttcagtctcattctatttcccaggctggagttcaatggcgtgatcacagctcactgtagccttgaactcctggccttaagagattctcctgcttcggtctcccaatagctaagactacagtagtccaccaccatatccagataatttttaaattttttggggggccgggcacagtggctcacgcctgtaatcccaacaccatgggaggctgagatgggtggatcacgaggtcaggagtttgagaccagcctgaccaacatggtgaaactctgtctctactaaaaaaaaaaaaaatagaaaaattagccgggcgtggtggcacacggcacctgtaatcccagctactgaggaggctgaggcaggagaatcacttgaacccagaaggcagaggttgcaatgagccgagattgcgccactgcactccagcctgggtgacagagtgagactctgtctcaaaaaaaaaaaattttttttttttttttgtagagatggatcttgctttgtttctctggttggccttgaactcctggcttcaagtgatcctcctaccttggcctcggaaagtgttgggattacaggcgtgagccaccatgactgacctgtcgtttaatcttgaggtacataaacctggctcctaaaggctaaatattttgttggagaaggggcattggattttgcatgaggatgattctgacctgggagggcaggtcagcaggcatctctgttgcacagatagagtgcacaggtctggagaacaaggagtggggggttattggaattccacattgtttgctgcacgttggattttgaaatgctagggaactttgggagactcatatttctgggctagaggatctgtggaccacaagatctttttatgatgacagtagcaatgtatctgtggagctggattctgggttgggagtgcaaggaaaagaatgtactaaatgccaagacatctatttcaggagcatgaggaataaaagttctagtttctggtctcagagtggtgcagggatcagggagtctcacaatctcctgagtgctggtgtcttagggcacactgggtcttggagtgcaaaggatctaggcacgtgaggctttgtatgaagaatcggggatcgtacccaccccctgtttctgtttcatcctgggcgtgtctcctctgcctttgtcccctagatgaagtctccatgagctacagggcctggtgcatccagggtgatctagtaattgcagaacagcaagtgctagctctccctccccttccacagctctgggtgtgggagggggttgtccagcctccagcagcatggggagggccttggtcagcctctgggtgccagcagggcaggggcggagtcctggggaatgaaggttttatagggctcctgggggaggctccccagccccaagcttaccacctgcacccggagagctgtgtcaccatgtgggtcccggttgtcttcctcaccctgtccgtgacgtggattggtgagaggggccatggttggggggatgcaggagagggagccagccctgactgtcaagctgaggctctttcccccccaacccagcaccccagcccagacagggagctgggctcttttctgtctctcccagccccactccaagcccatacccccagcccctccatattgcaacagtcctcactcccacaccaggtccccgctccctcccacttaccccagaactttctccccattgcccagccagctccctgctcccagctgctttactaaaggggaagttcctgggcatctccgtgtttctctttgtggggctcaaaacctccaaggacctctctcaatgccattggttccttggaccgtatcactggtccacctcctgagcccctcaatcctatcacagtctactgacttttcccattcagctgtgagtgcccaaccctatcccagagaccttgatgcttggcctcccaatcttgccctaggatacccagatgccaaccagacacctccttcttcctagccaggctatctggcctgagacaacaaatgggtccctcagtctggcaatgggactctgagaactcctcattccctgactcttagccccagactcttcattcagtggcccacattttccttaggaaaaacatgagcatccccagccacaactgccagctctctgattccccaaatctgcatccttttcaaaacctaaaaacaaaaagaaaaacaaataaaacaaaaccaactcagaccagaactgttttctcaacctgggacttcctaaactttccaaaaccttcctcttccagcaactgaacctcgccataaggcacttatccctggttcctagcaccgcttatcccctcagaatccacaacttgtaccaagtttcccttctcccagtccaagaccccaaatcaccacaaaggacccaatccccagactcaagatatggtctgggcgctgtcttgtgtctcctaccctgatccctgggttcaactctgctcccagagcatgaagcctctccaccagcaccagccaccaacctgcaaacctagggaagattgacagaattcccagcctttcccagctccccctgcccatgtcccaggactcccagccttggttctctgcccccgtgtcttttcaaacccacatcctaaatccatctcctatccgagtcccccagttcctcctgtcaaccctgattcccctgatctagcaccccctctgcaggtgctgcacccctcatcctgtctcggattgtgggaggctgggagtgcgagaagcattcccaaccctggcaggtgcttgtggcctctcgtggcagggcagtctgcggcggtgttctggtgcacccccagtgggtcctcacagctgcccactgcatcaggaagtgagtaggggcctggggtctggggagcaggtgtctgtgtcccagaggaataacagctgggcattttccccaggataacctctaaggccagccttgggactgggggagagagggaaagttctggttcaggtcacatggggaggcagggttggggctggaccaccctccccatggctgcctgggtctccatctgtgttcctctatgtctctttgtgtcgctttcattatgtctcttggtaactggcttcggttgtgtctctccgtgtgactattttgttctctctctccctctcttctctgtcttcagtctccatatctccccctctctctgtccttctctggtccctctctagccagtgtgtctcaccctgtatctctctgccaggctctgtctctcggtctctgtctcacctgtgccttctccctactgagcacacgcatgggatgggcctggggggaccctgagaaaaggaagggctttggctgggcgcggtggctcacacctgtaatcccagcactttgggaggccaaggcaggtagatcacctgaggtcaggagttcgagaccagcctggccaactggtgaaaccccatctctactaaaaatacaaaaaattagccaggcgtggtggcgcatgcctgtagtcccagctactcaggaggctgagggaggagaattgcttgaacctgggaggtggaggttgcagtgagccgagaccgtgccactgcactccagcctgggtgacagagtgagactccgcctcaaaaaaaaaaaaaaaaaaaaagaaaagaaaagaaaagaaaaggaagtgttttatccctgatgtgtgtgggtatgagggtatgagagggcccctctcactccattccttctccaggacatccctccactcttgggagacacagagaagggctggttccagctggagctgggaggggcaattgagggaggaggaaggagaagggggaaggaaaacagggtatgggggaaaggaccctggggagcgaagtggaggatacaaccttgggcctgcaggccaggctacctacccacttggaaacccacgccaaagccgcatctacagctgagccactctgaggcctcccctccccagcggtccccactcagctccaaagtctctctcccttttctctcccacactctatcatcccccggattcctctctacttggttctcattcttcctttgacttcctgcttccctttctcattcatctgtttctcactttctgcctggttttgttcttctctctctctttctctggcccatgtctgtttctctatgtttctgtcttttctttctcatcctgtgtattttcggctcaccttgtttgtcactgttctcccctctgccctttcattctctctgtccttttaccctcttcctttttcccttggtttctctcagtttctgtatctgcccttcaccctctcacactgctgtttcccaactcgttgtctgtatttttggcctgaactgtgtcttccccaaccctgtgtttttctcactgtttctttttctcttttggagcctcctccttgctcctctgtcccttctctctttccttatcatcctcgctcctcattcctgcgtctgcttcctccccagcaaaagcgtgatcttgctgggtcggcacagcctgtttcatcctgaagacacaggccaggtatttcaggtcagccacagcttcccacacccgctctacgatatgagcctcctgaagaatcgattcctcaggccaggtgatgactccagccacgacctcatgctgctccgcctgtcagagcctgccgagctcacggatgctgtgaaggtcatggacctgcccacccaggagccagcactggggaccacctgctacgcctcaggctggggcagcattgaaccagaggagtgtacgcctgggccagatggtgcagccgggagcccagatgcctgggtctgagggaggaggggacaggactcctaggtctgagggaggagggccaaggaaccaggtggggtccagcccacaacagtgtttttgcctggcccgtagtcttgaccccaaagaaacttcagtgtgtggacctccatgttatttccaatgacgtgtgtgcgcaagttcaccctcagaaggtgaccaagttcatgctgtgtgctggacgctggacagggggcaaaagcacctgctcggtgagtcatccctactcccaagatcttgaggggaaaggtgagtggggaccttaattctgggctggggtctagaagccaacaaggcgtctgcctcccctgctccccagctgtagccatgccacctccccgtgtctcatctcattccctccttccctcttctttgactccctcaaggcaataggttattcttacagcacaactcatctgttcctgcgttcagcacacggttactaggcacctgctatgcacccagcactgccctagagcctgggacatagcagtgaacagacagagagcagcccctcccttctgtagcccccaagccagtgaggggcacaggcaggaacagggaccacaacacagaaaagctggagggtgtcaggaggtgatcaggctctcggggagggagaaggggtggggagtgtgactgggaggagacatcctgcagaaggcgggagtgagcaaacacctgccgcaggggaggggagggccctgcggcacctgggggagcagagggaacagcatctggccaggcctgggaggaggggcctagagggcgtcaggagcagagaggaggttgcctggctggagtgaaggatcggggcagggtgcgagagggaagaaaggacccctcctgcagggcctcacctgggccacaggaggacactgcttttcctctgaggagtcaggaactgtggatggtgctggacagaagcaggacagggcctggctcaggtgtccagaggctgccgctggcctccctatgggatcagactgcagggagggagggcagcagggatgtggagggagtgatgatggggctgacctgggggtggctccaggcattgtccccacctgggcccttacccagcctccctcacaggctcctggccctcagtctctcccctccactccattctccacctacccacagtgggtcattctgatcaccgaactgaccatgccagccctgccgatggtcctccatggctccctagtgccctggagaggaggtgtctagtcagagagtagtcctggaaggtggcctctgtgaggagccacggggacagcatcctgcagatggtcctggcccttgtcccaccgacctgtctacaaggactgtcctcgtggaccctcccctctgcacaggagctggaccctgaagtcccttccccaccggccaggactggagcccctacccctctgttggaatccctgcccaccttcttctggaagtcggctctggagacatttctctcttcttccaaagctgggaactgctatctgttatctgcctgtccaggtctgaaagataggattgcccaggcagaaactgggactgacctatctcactctctccctgcttttacccttagggtgattctgggggcccacttgtctgtaatggtgtgcttcaaggtatcacgtcatggggcagtgaaccatgtgccctgcccgaaaggccttccctgtacaccaaggtggtgcattaccggaagtggatcaaggacaccatcgtggccaacccctgagcacccctatcaaccccctattgtagtaaacttggaaccttggaaatgaccaggccaagactcaagcctccccagttctactgacctttgtccttaggtgtgaggtccagggttgctaggaaaagaaatcagcagacacaggtgtagaccagagtgtttcttaaatggtgtaattttgtcctctctgtgtcctggggaatactggccatgcctggagacatatcactcaatttctctgaggacacagataggatggggtgtctgtgttatttgtggggtacagagatgaaagaggggtgggatccacactgagagagtggagagtgacatgtgctggacactgtccatgaagcactgagcagaagctggaggcacaacgcaccagacactcacagcaaggatggagctgaaaacataacccactctgtcctggaggcactgggaagcctagagaaggctgtgagccaaggagggagggtcttcctttggcatgggatggggatgaagtaaggagagggactggaccccctggaagctgattcactatggggggaggtgtattgaagtcctccagacaaccctcagatttgatgatttcctagtagaactcacagaaataaagagctgttatactgtggtttattctggtttgttacattgacaggagacacactgaaatcagcaaaggaaacaggcatctaagtggggatgtgaagaaaacagggaaaatctttcagttgttttctcccagtggggtgttgtggacagcacttaaatcacacagaagtgatgtgtgaccttgtgtatgaagtatttccaactaaggaagctcacctgagccttagtgtccagagtttttattgggggtctgtaggataggcatggagtactggaatagctgaccttaacttctcagacctgaggttcccaagagttcaagcagatacagcatggcctagagcctcagatgtacaaaaacaggcattcatcatgaatcgcactgttagcatgaatcatctggcacggcccaaggccccaggtataccaaggcacttgggccgaatgttccaagggattaaatgtcatctcccaggagttattcaagggtgagccctgtacttggaacgttcaggctttgagcagtgcagggctgctgagtcaaccttttactgtacaggggggtgagggaaagggagaagatgaggaaaccgcctagggatctggttctgtcttgtggccaagtggaccatggggctatcccaagaaggaggaattcagaaataggggaaggttgaggaaggacactgaactcaaaggggatacagtgattggtttatttgtcttctcttcacaacattggtgctggaggaattcccaccctgaggttatgaagatgtctgaacacccaacacatagcactggagatatgagctcgacaagagtttctcagccacagagattcacagcctagggcaggaggacactgtacaccaggcagaatgacatgggaattgcgctcacgattggcttgaagaagcaaggactgtgggaggtgggctttgtagtaacaagagggcagggtgaactctgattcccatgggggaatgtgatggtcctgttacaaatttttcaagctggcagggaataaaacccattacggtgaggacctgtggagggcggctgccccaactgataaaggaaatagccaggtgggggcctttcccattgtaggggggacatatctggcaatagaagcctttgagaccctttagggtacaagtactgaggcagcaaataaaatgaaatcttatttttcaactttatactgcatgggtgtgaagatatatttgtttctgtacagggggtgagggaaaggaggggaggaggaaagttcctggaggtctggtttggtcttgtgatccagggggtcttggaactatttaaattaaattaaattaaaacaagcgactgttttaaattaaattaaattaaattaaattaaattaaattaaattttactttattttatcttaagttctgggctacatgtgcaggacgtgcagctttgttacataggtaaacatgtgccatggtggtttgctgtacctatcaacccatcacctaggtattaagcccagcatgcattagctgtttttcctgacgctctccctctccctgactcccacaacaggccccagtgtgtgttgttcccctccctgtgtccatgtgttctcattgttcagctcccacttataagtgagaacatgtggtgtttggttttctgtttctgtgttagtttgctgaggataatggcttccacctccatccatgttcctgcaaaggacgtgatcttattcttttttatggttgcatagaaattgtttttacaaatccaattgatattgtatttaattacaagttaatctaattagcatactagaagagattacagaagatattaggtacattgaatgagaaaatatataaaataggacgaaggtgaaatattaggtaggaaaagtataatagttgaaagaagtaaaaaaaaatatgcatgagtagcagaatgtaaaagaggtgaagaacgtaatagtgactttttagaccagattgaaggacagagacagaaaaattttaaggaattgctaaaccatgtgagtgttagaagtacagtcaataacattaaagcctcaggaggagaaaagaataggaaaggaggaaatatgtgaataaatagtagagacatgtttgatggattttaaaatatttgaaagacctcacatcaaaggattcataccgtgccattgaagaggaagatggaaaagccaagaagccagatgaaagttagaaatattattggcaaagcttaaatgttaaaagtcctagagagaaaggatggcagaaatattggcgggaaagaatgcagaacctagaatataaattcatcccaacagtttggtagtgtgcagctgtagccttttctagataatacactattgtcatacatcgcttaagcgagtgtaaaatggtctcctcactttatttatttatatatttatttagttttgagatggagcctcgctctgtctcctaggctggagtgcaatagtgcgataccactcactgcaacctctgcctcctctgttcaagtgattttcttacctcagcctcccgagtagctgggattacaggtgcgtgccaccacacccggctaatttttgtattttttgtagagacggggttttgccatgttggccaggctggtcttgaactcctgacatcaggtgatccacctgccttggcctcctaaagtgctgggattacaggcatgagccaccgtgcccaatcactttatttattttttatttttatttttaaatttcagcttctatttgaaatacagggggcacatatataggattgttacatgggtatattgaactcaggtagtgatcatactacccaacaggtaggttttcaacccactccccctcttttcctccccattctagtagtgtgcagtgtctattgttctcatgtttatgtctatgtgtgctccaggtttagctcccacctgtaagtgagaacgtgtggtatttgattttctgtccctgtgttaattcacttaggattatggcttccagctccattcatattgctgtaaaggatatgattcatttttcatggccatgcagtattccatattgcgtatagatcacattttctttcttttttttttttgagacggagtcttgctttgctgcctaggctggagtgcagtagcacgatctcggctcactgcaagcttcacctccggggttcacgtcattcttctgtctcagcttcccaagtagctgggactacaggcgcccgccaccacgtccggctaatttttttgtgtgtttttagtagagatgggggtttcactgtgttagccaggatggtcttgatctcctgaccttgtggtccacctgcctcggtctcccaaagtgctgggattacaggggtgagccactgcgcccggcccatatataccacattttctttaaccaatccaccattgatgggcaactaggtagattccatggattccacagttttgctattgtgtgcagtgtggcagtagacatatgaatgaatgtgtctttttggtataatgatttgcattcctttgggtatacagtcattaataggagtgctgggttgaacggtggctctgtttaaaattctttgagaattttccaaactgtttgccatagagaacaaactaatttacatttccacgaacagtatataagcattcccttttctccacagctttgtcatcatggtttttttttctttattttaaaaaagaatatgttgttgttttcccagggtacatgtgcaggatgtgcaggtttgttacataggtagtaaacgtgagccatggtggtttgctgcacctgtcaacccattacctgggtatgaagccctgcctgcattagctcttttccctaatgctctcactactgccccaccctcaccctgacagggcaaacagacaacctacagaatgggaggaaatttttgcaatctattcatctgacaaaggtcaagaatatccagaatctacaaggaacttaagcaaatttttactttttaataatagccactctgactggcgtgaaatggtatctcattgtggttttcatttgaatttctctgatgatcagtgacaatgagcattttttcatatttgttggctgcttgtacgtcttttgagaagtgtctcttcatgccttttggccactttaatgggattattttttgctttttagtttaagttccttatagattctggatattagacttcttattggatgcatagtttgtgaatactctcttccattctgtaggttgtctgtttactctattgatggcttcttttgctgtgccgaagcatcttagtttaattagaaaccacctgccaatttttgtttttgttgcaattgcttttggggacttagtcataaactctttgccaaggtctgggtcaagaagagtatttcctaggttttcttctagaattttgaaagtctgaatgtaaacatttgcatttttaatgcatcttgagttagcttttgtatatgtgaaaggtctactctcattttctttccctctttctttctttcttttctttccctctttctttctttcttttctttctttctttctttctttctttctttctttctttctttctttttgtccttctttctttctttctctttctttctctctttctttttttttttttttgatggagtattgctctgttgcccaggctgcagtgcagtggcacgatcttggctcactgcaacctctgcctcctgggttcaactgattctcctgcatcagccttccaagtagctgggattataggcgcccgccaccacgcccgactaatttttgtatttttagtagagacggggttgtgccatgttggccaggctggtttgaaactcctgacctcaaacgatctgcctgccttggcctcccaaagtgctgggattacaggtgtgagccactgtgcccagccaagaatgtcattttctaagaggtccaagaacctcaagatattttgggaccttgagaagagaggaattcatacaggtattacaagcacagcctaatggcaaatctttggcgtggcttggcttcaagactttaggctcttaaaagtcgaatccaaaattttttataaaagctccagctaagctaccttaaaaggggcctgtatggctgatcactcttcttgctatactttacacaaataaacaggccaaatataatgaggccaaaatttattttgcaaataaattggtcctgctatgatttactcttggtaagaacagggaaaatagagaaaaatttagattgcatctgacctttttttctgaatttttatatgtgcctacaatttgagctaaatcctgaattattttctggttgcaaaaactctctaaagaagaacttggttttcattgtcttcgtgacacatttatctggctctttactagaacagttttcttgtttttggtgttctagcttgtgtgccttacagttctactcttcaaattattgttatgtgtatctcatagttttccttcttttgagaaaactgaagccatggtattctgaggactagagatgactcaacacagctggtgaatctcctcatatgcaatccactgggcttgatctgcttcagattgctgatgcactgctgctaaagctatacatttaaaaccctcactaaaggatcagggaccatcatggaagaggaggaaacatgaaattgtaagagccagattcggggggtagagtgtggaggtcagagcaactccaccttgaataagaaggtaaagcaacctatcctgaaagctaacctgccatggtggcttctgattaacccctgttctgggaagactgacagtttgggtctgtgtcattgcccaaatctcatgttaaattgtaatccccagtgttcggaggtgggacttggtggtaggtgattcggtcatgggagtagattttcttctttgtggtgttacagtgatagtgagtgagttctcgtgagatctggtcatttaaaagtgtgtggcccctcccctccctctcttggtcctcctactgccatgtaagatacctgctcctgctttgccttctaccataagtaaaagccccctgaggcctccccagaagcagatgccaccatgcttcctgtacagcctgcagaaccatcagccaattaaacctcttttctgtataaattaccagtcttgagtatttctttacagcagtgtgagaacggactaatacaaggatctccaaaattccaagtttatgtattctttcttgccaaatagcaggtatttaccataaatcctgtccttaggtcaaacaaccttgatggcatcgtacttcaattgtcttacacattccttctgaatgactcctcccctatggcatataagccctgggtcttgggggataatggcagaggggtccaccatcttgtctggctgccacctgagacacagacatggcttctgttggtaagtctctattaaatgtttctttctaagaaactggatttgtcagcttgtttctttggactctcagcttcctcagactttggggtaggttgcacaaccctgcccaccatgaaacaaatgtttaatatgataaatatggatagatataatccacataaataaaagctcttggagggccctcaataattgttaagagtgtaaatgtgtccaaagatggaaaatgtttgagaactactgtcccagagattttcctgagttctagagtgtgggaatatagaacctggagcttggcttcttcagcctagaatcaggagtatggggctgaagtctgaagcttggcttcagcagtttggggttggcttccggagcacatatttgacatgttgcgactgtggtttggggtttggtatttgctctgaatcctaatgtctgtccttgaggcatctagaatctgaaatctgtggtcagaattctattatcttgagtaggacatctccagtcctggttctgccttctagggctggagtctgtagtcagtgacccggtctggcatttcaacttcatatacagtgggctatcttttggtccatgtttcaaccaaacaaccgaataaaccattagaacctttccccacttccctagctgcaatgttaaacctaggatttctgtttaataggttcatatgaataatttcagcctgatccaactttacattccttctaccgttattctacacccaccttaaaaatgcattcccaatatattccctggattctacctatatatggtaatcctggctttgccagtttctagtgcattaacatacctgatttacattcttttactttaaagtggaaataagagtccctctgcagagttcaggagttctcaagatggcccttacttctgacatcaattgagatttcaagggagtcaccaagatcatcctcaggttcagtgattgctggtagccctcatataactcaatgaaagctgttatgctcatggctatggtttattacagcaaaagaatagagatgaaaatctagcaagggaagagttgcatggggcaaagacaaggagagctccaagtgcagagattcctgttgttttctcccagtggtgtcatggaaagcagtatcttctccatacaatgatgtgtgataatattcagtgtattgccaatcagggaactcaactgagccttgattatattggagcttggttgcacagacatgtcgaccaccttcatggctgaactttagtacttagcccctccagacgtctacagctgataggctgtaacccaacattgtcaccataaatcacattgttagactatccagtgtggcccaagctcccgtgtaaacacaggcactctaaacaggcaggatatttcaaaagcttagagatgacctctcaggagctgaatgcaaagacctggcctctttgggcaaggagaatcctttactgcacactctccttcacagggttattgtgaggatcaaatgtggtcatgtgtgtgagacaccagcacatgtctggctgtggagagtgacttctatgtgtgctaacattgctgagtgctaagaaagtattaggcatggctttcagcactcacagatgctcatctaatcctcacaacatggctacagggtgggcactactagcctcatttgacagaggaaaggactgtggataagaagggggtgaccaataggtcagagtcattctggatgcaaggggctccagaggaccatgattagacattgtctgcagagaaattatggctggatgtctctgccccggaaagggggatgcactttccttgaccccctatctcagatcttgactttgaggttatctcagacttcctctatgataccaggagcccatcataatctctctgtgccctctccccttcctcagtcttactgcccactcttcccagctccatctccagctggccaggtgtagccacagtacctaactctttgcagagaactataaatgtgtatcctacaggggagaaaaaaaaaagaactctgaaagagctgacattttaccgacttgcaaacacataagctaacctgccagttttgtgctggtagaactcatgagactcctgggtcagaggcaaaagattttattacccacagctaaggaggcagcatgaactttgtgttcacatttgttcactttgccccccaattcatatgggatgatcagagcagttcaggtggatggacacaggggtttgtggcaaaggtgagcaacctaggcttagaaatcctcaatcttataagaaggtaccagcaaacttgtccagtctttgtatctgacggagatattatctttataattgggttgaaagcagacctactctggaggaacatattgtatttattgtcctgaacagtaaacaaatctgctgtaaaatagacgttaactttattatctaaggcagtaagcaaacctagatctgaaggcgataccatcttgcaaggctatctgctgtacaaatatgcttgaaaagatggtccagaaaagaaaacggtattattgcctttgctcagaagacacacagaaacataagagaaccatggaaaattgtctcccaacactgttcacccagagccttccactcttgtctgcaggacagtcttaacatcccatcattagtgtgtctaccacatctggcttcactgtgcctaaccaagatttctaggtccagttccccaccatgtttggcagtgccccactgccaaccccagaataagggagtgctcagaatttcgaggggacatgggtggggatcagaacttctgggcttgagtgcagagggggcccatactccttggttccgaaggaggaagaggctggaggtgaatgtccttggagaggaggaatgtgggttctgaactcttaaatccccaagggaggagactggtaaggtcccagcttccgaggtactgacgtgggaatggcctgagaggtctaagaatcccgtatcctcgggaagaaggggctgaaattgtgaggggttgagttgcaggggtttgttagcttgagactccttggtgggtccctgggaagcaaggactggaaccattggctccagggtttggtgtgaaggtaatggaatctcctgattctcaaagggtcagaggactgagagttgcccatgctttgatctttccatctactccttactccacttgagggtaatcacctactcttctagttccacaagagtgcgcctgcgcgagtataatctgcacatgtgccatgtcccgaggcctggggcatcatccactcatcattcagcatctgcactatgcgggcgaggccggcgccatgacgtcatgtagctgcgactatccctgcagcgcgcctctcccgtcacgtcccaaccatggagctgtggacgtgcgtcccctggtggatgtggcctgcgtggtgccaggccggggcctggtgtccgataaagatcctagaaccacaggaaaccaggactgaaaggtgctagagaatggccatatgtcgctgtccatgaaatctcaaggacttctgggtggagggcacaggagcctgaacttacgggtttgccccactccactgtcctcccaagtgagtctcccagatacgaggcactgtgccagcatcagcttcatctgtaccacatcttgtaacagggactacccagggccctgatgaacaccatggtgtgtgcaggaagagcgggtgaaggcacggactcctgtgtggtcagagcccagagggggccatgacgggtggggaggaggctgtggactggctcgagaagtgggatgtggttgtgtttgatctcctttggccagataaagtgctggatatagcattgaaaacggagtatgaagaccagttagaatggagggtcaggttggagttgagttacagatggggtaaaattctgcttcggatgagtttggggattggcaatttaaaggtggtttgggatggcatggctttgggatggaaataggtttgtttttatgttggctgggaagggtgtggggattgaattggggatgaagtaggtttagttttggagatagaatacatggagctggctattgcatgcgaggatgtgcattagtttggtttgatctttaaatgaaggaggctattagggttgtcttgaattagattaagttgtgttgggttgatgggttgggcttgtgggtgatgtggttggattgggctgtgttaaattggtttgggtcaggttttggttgaggttatcatggggatgaggatatgcttgggacactggattcaggtggttctcattcaagctgaggcaaatttcctttcagacggtcattccagggaacgagtggttgtgtgggggaaatcaggccactggctgtgaatatccctctatcctggtcttgaattgtgattatctatgtccacttctgtctccttcactgtacttggaattgatctggtcattcagctggaaatgggggaagattttgtcaaattcttgagacacagctgggtctggatcagcgtaagctgctctggttttattgaacagatgaaatcacattttttttttcaaaatcaaagaaatcttatagagttaacagtggactcttataataagagttaacaccaggactcttattcttgattcttttctgagacaccaaaatgagatttctcaatgccaccctaattctttttttttttttttttttttttgagacacagtctgggtcttttgctctgtcactcaggctggagcgcagtggtgtgatcatagctcactgaacccttgacctcctggacttaagggatcctcctgcttcagcctcctgagtagatggggctacaggtgcttgccaccacacctggctaattaaattttttttttttttttgtagagaaagggtctcactttgttgccctggctgatcttgaacttctgacttcaagtgattcttcagccttggactcccaaagcactgggattgctggcatgagccactcaccgtgcctggcttgcagcttaatcttggagtgtataaacctggctcctgatagctagacatttcagtgagaaggaggcattggattttgcatgaggacaattctgacctaggagggcaggtcaacaggaatccccgctgtacctgtacgttgtacaggcatggagaatgaggagtgaggagccaccggaaccccatattgtttagtggacattggattttgaaataatagggaacttggtctgggagagtcatatttctggattggacaatatgtggtatcacaaggttttatgatgagggagaaatgtatgtggggaaccattttctgagtgtggaagtgcaagaatcagagagtactgaatgccaacgcttctatttcaggaacatggtaagttggaggtccagcttctgggctcagacgggtatagggaccaggaagtctcacaatccgatcattctgatatttcagggcatattaggtttggggtgcaaaggaagtacttgggacttaggcacatgagactttgtattgaaaatcaatgattggggctggccgtggtggctcacgcctgtaatctcatcactttgggagaccgaagtgggaggatggcttgagcccaggagttggagaccagcctaggcaacatagccagaccctctctctacaaaaaaattaaaaattagctggatgtggtggtgcatgcttgtggtctcagctatcctggaggctgagacaggagaatcggttgagtctgggagttcaaggctacagggagctgcgatcacgccgctgcactccagcctgggaaacagagtgagactgtctcagaatttttttaaaaaagaatcagtgatcatcccaacccctgttgctgttcatcctgagcctgccttctctggctttgttccctagatcacatctccatgatccataggccctgcccaatctgacctcacaccgtgggaatgcctccagactgatctagtatgtgtggaacagcaagtgctggctctccctccccttccacagctctgggtgtgggagggggttgtccagcctccagcagcatggggagggccttggtcagcatctaggtgccaacagggcaagggcggggtcctggagaatgaaggctttatagggctcctcagggaggccccccagccccaaactcaccacctggccgtggacacctgtgtcagcatgtgggacctggttctctccatcgccttgtctgtggggtgcactggtgagattggggggataaaggaaggggggcgggttctgactcttatgctgaagcccttttcctcccacccagtgccccagcctcgtcccttcagcccacagttcagcccagacaatgtgcccctgactcttccacattgcaatagtcctcatgcccacactaggtccccgctccctcccacttacctcagacctttctctccattgcccagccaaatccctgctcccagctgctttactaaagagcaagttcctgggcatctctgtgtttctctttatggggttcaaaacctttcaaggacctctctccatgccactggttccttggaccctatcactgggctgcctcctgagcccctcagtcctaccacagtctactgacttttcctattcagctgtgagcattcaaccctgtcccctggaccttgacacctggctccccaaccctgtcccaggaaacccagattccaccagacacttccttcttccccccgaggctatctggcctgagacaacaaatgctgcctcccaccctgagtctggcactgggactttcagaactcctccttccctgactctttgccccagacccgtcattcaatggctagctttttccatgggaaaaacacgagcacccccaaccacaacggccagttctctgattccctaaatccgcacccttttcaaaacctcaaaaacaaaacaaaacaaaacaaagcaagaaacaactcaggcagaactgtttgcttaaccttggacatggtaaaccatccaaaaccttcctctcccagcaactaaacctctccactgggcacttatccttggtttctggaacctcttattctcttagaacccacagctgccaccacagtgtcccttctcccagtgtaagaccccaaatcactccaaatgacccaacccccaacccgatgcctgcttcagatgtttcccatgtcccctactctgatctctggggtcagctccgttctcagagcatgaagcctcccgacctggtccagccaccaacccgctaacgcagggaatagctacagaattgccagccctcccaggaccccttgcttgtgtcctggactcccagtcctggtcctctgcccccatgtctcttcaaacccacagctcagctccctcccctatccaattcttttgggtctgatccccctgacccagcaccccctccgcaggtgccgtgcccctcatccagtctcggattgtgggaggctgggagtgtgagaagcattcccaaccctggcaggtggctgtgtacagtcatggatgggcacactgtgggggtgtcctggtgcacccccagtgggtgctcacagctgcccattgcctaaagaagtaagtaggaccctgggatctggggagggaatggctgtgtcccacaggaataacagcgggatgcttcccccagggtcacttctcaggtgaggcttcagactaaaggagagagggaaggtcctggcccaggtcgcacccggaggcagagctggggctggaccactctccccatggctgcctgggtttctctctgtgtctgatctcgctgtgtctcttggtatctggctctggttgtgtctgtatgactgtgttttggtctctatgtccctctctcttttctgtctccctgtgtctgtgtctcccccgtctctgtctctgggtctctctgtggccatctctgtcaccgtgtgtctcaccctgcatctctttgcctgtctttctctctgggtctctgcctcagcccttcctcatcactactgaacacaccccgtgagggtgggtggggagcacccagaaaaaggaaggactttaagctcaatgtgtgtgcatgtgagggggtgcctgtcattgcacagcactctctgcaggacatccctccaccctggggagacacagggagggctggtttcagctgtagctgggtgcacaattgaggagggaggaaggagaaggggaaacaagaaaggaggggaaggtggccgggcacggtggcccacgcctgtaatcccagcactttgggaggccgaggtgggtggatcatctgaggtcaggagtttgaaaccagcctggccaacatggcaaaaccccgtctctactaaaaatacaaaaagtagccaggcgtggtgctgcgcgcctgtaatcccaattactagggaggctgaggcaggagaatcgcttgaacccgggagggagaggttgcagtgagccgagatcgtgccactgcactccagcctgggtgacagagcaagactccatctcagaaaaaacaaacaaacaaacaaacaacaaaaaaaatcgaaaggaggggaagggagctggagagagaaagggggacgtggccctgagctgtgggccgggccacccgccactacagagccctcactccagccccagctgcaggtgagccaccctcatgcctctcctcctccccctgctactccacactcctcagatgcccccgtggcctccctcctttttctctcccacactgtatcacccctggcttcctctctgctgtttctccttctctctctgacttcccgcatccttttctcatttgtctatttctcactcccttcctggttctgttctttctcccttcctcttccccatgtctatttcttgctgtctctgtctcttctttgctcatcctaattctcactgttctcccttctgtttttgtcattcctctgccattttatgctctctcttttccacttcgtttctttcagtttctgtctctgcctctcacatgatcacactcctgttttctaactcactgtctgtatttcaccacgactatatctccccgacccctgtgcttttctcactgtttctttttcttccctttggagtctcccttatcctcccctgccccatctacctttccccattttctctctcctcatgcatccacccccttcctccccaggaatagccaggtctggctgggtcggcacaacctgtttgagcctgaagacacaggccagagggtccctgtcagccacagcttcccacacccgctctacaatatgagccttctgaagcatcaaagccttagaccagatgaagactccagccatgacctcatgctgctccgcctgtcagagcctgccaagatcacagatgttgtgaaggtcctgggcctgcccacccaggagccagcactggggaccacctgctacgcctcaggctggggcagcatcgaaccagaggagtgtacgcctgggccagatggtgtagctgggagcccagatgcctgggtctgagggaagtggggccaaagaaccaggtggggtccggccacagcccagtttttctctgacccatagtcttgcgccccaggagtcttcagtgtgtgagcctccatctcctgtccaatgacatgtgtgctagagcttactctgagaaggtgacagagttcatgttgtgtgctgggctctggacaggtggtaaagacacttgtggggtgagtcatccctactcccaacatctggaggggaaaggtgagtgaagaccctaattctgggctgcaatctgaaagctaaccagacatctgcctcccctgctccccagctatagccacgccccctccccatgcctcatctgccgccctccttcccccttccctgactccctcaacacaagaggtgattctcacagcataattcacccattcctgtgttgagcacatgcttactgggcacctgctacgtgaccagcattgccgtagaccctgggaagcagcagtgaacaggtagagagcagcctctccctcctgcagcccccatgctggtgaggggcactggcaggaacagtggacccaacatggaaatgctggagggtgtcaggaagtgatcgggctctggggcagggaggaggggtggggagtgtcactgggaggggacatcctgcagaaggtaggagtgagcaaacacccgctgcaggggaggggagagccctgcggcacctgggggagcagagggagcagcacctgcccaggcctgggaggaggggccgggagggcgtgaggaggagcgagggggctgcatggctggagtgagggatcaggggcagggcgcgagatggcctcacacagggaagagagggcccctcctgcagggcctcacctgggccacaggaggacactgcttttcctctgaggagtcaggagctgtggatggtgctggacagaagaaggacagggcctggctcaggtgtccagaggctgtcgctggcttccctttgggatcagactgcagggagggagggcggcagggttgtggggggagtgacgatgaggatgacctgggggtggctccaggccttgcccctgcctgggccctcacccagcctccctcacagtctcctggccctcagtctctcccctccactccatcctccatctggcctcagtgggtcattctgatcactgaactgaccatacccagccctgcccacggccctccatggctccccaatgccctggagaggggacatctagtcagagagtagtcctgaagaggtggcctctgcgatgtgcctgtgggggcagcatcctgcagatggtcccggccctcatcctgctgacctgtctgcagggactgtcctcctggaccttgccccttgtgcaggagctggaccctgaagtcccctccccataggccaagactggagccttgttccctctgttggactccctgcccatattcttgtgggagtgggttctggagacatttctgtctgttcctgagagctgggaattgctctcagtcatctgcctgcgcggttctgagagatggagttgcctaggcagttattggggccaatctttctcactgtgtctctcctcctttacccttagggtgattctgggggtccacttgtctgtaatggtgtgcttcaaggtatcacatcatggggccctgagccatgtgccctgcctgaaaagcctgctgtgtacaccaaggtggtgcattaccggaagtggatcaaggacaccatcgcagccaacccctgagtgcccctgtcccacccctacctctagtaaatttaagtccacctcacgttctggcatcacttggcctttctggatgctggacacctgaagcttggaactcacctggccgaagctcgagcctcctgagtcctactgacctgtgctttctggtgtggagtccagggctgctaggaaaaggaatgggcagacacaggtgtatgccaatgtttctgaaatgggtataatttcgtcctctccttcggaacactggctgtctctgaagacttctcgctcagtttcagtgaggacacacacaaagacgtgggtgaccatgttgtttgtggggtgcagagatgggaggggtggggcccaccctggaagagtggacagtgacacaaggtggacactctctacagatcactgaggataagctggagccacaatgcatgaggcacacacacagcaaggatgacgctgtaaacatagcccacgctgtcctgggggcactgggaagcctagataaggccgtgagcagaaagaaggggaggatcctcctatgttgttgaaggagggactagggggagaaactgaaagctgattaattacaggaggtttgttcaggtcccccaaaccaccgtcagatttgatgatttcctagcaggacttacagaaataaagagctatcatgctgtggtttattatggtttgttacattgataggatacatactgaaatcagcaaacaaaacagatgtatagattagagtgtggagaaaacagaggaaaacttgcagttacgaagactggcaacttggctttactaagttttcagactggcaggaagtcaaacctattaggctgaggaccttgtggagtgtagctgatccagctgatagaggaactagccaggtgggggcctttccctttggatggggggcatatctgacagttattctctccaagtggagacttacggacagcatataattctccctgcaaggatgtatgataatatgtacaaagtaattccaactgaggaagctcacctgatccttagtgtccagggtttttactgggggtctgtaggacgagtatggagtacttgaataattgacctgaagtcctcagacctgaggttccctagagttcaaacagatacagcatggtccagagtcccagatgtacaaaaacagggattcatcacaaatcccatctttagcatgaagggtctggcatggcccaaggccccaagtatatcaaggcacttgggcagaacatgccaaggaatcaaatgtcatctcccaggagttattcaagggtgagccctttacttgggatgtacaggctttgagcagtgcagggctgctgagtcaaccttttattgtacaggggatgagggaaagggagaggatgaggaagcccccctggggatttggtttggtcttgtgatcaggtggtctatggggctatccctacaaagaagaatccagaaataggggcacattgaggaatgatactgagcccaaagagcattcaatcattgttttatttgccttcttttcacaccattggtgagggagggattaccaccctggggttatgaagatggttgaacaccccacacatagcaccggagatatgagatcaacagtttcttagccatagagattcacagcccagagcaggaggacgctgcacaccatgcaggatgacatgggggatgcgctcgggattggtgtgaagaagcaaggactgttagaggcaggctttatagtaacaagacggtggggcaaactctgatttccgtgggggaatgtcatggtcttgctttactaagttttgagactggcaggtagtgaaactcattaggctgagaaccttgtggaatgcagctgacccagctgatagaggaagtagccaggtgggagcctttcccagtgggtgtgggacatatctggcaagattttgtggcactcctggttacagatactggggcagcaaataaaactgaatcttgttttcagaccttatactgtgtaattgtaagtggacatttagtaatgtacagggggtcagggaaagacgggggatagtgaatgcacctgtgggactggtttggttttgtgattgagtaacccatggagttatctctgcaatgatgaattgtttgaaagaaacctgattgattttatactgaattagaagttaataagcatgctgaaaaataagagaacatattaggaatattgagcaagactaacatacataaaatatgagaaaaaggtaggaaatattaggtgggaaaaatatgataattggaaaaagtaaaaaaaatggattaatagaattgagtagaggtgaagaacgcaatagtgacattttagactagattgaagaaaaatgtcaaagaaatactgaatgatgtgagtgctggcagtgcagatactgaacactaaagactcaggaagagagaaaaataggaaaggaggaaacacatgactaaacactgaaggcaggttttttttttttttttttttttcgcagagtttcactcttatcgcccaggctggagtgcaatggctcagtctcggctcactgcaacccctgcctcccagttcaagtgattctcctgcttcagcctccccagtagctgggattacaggtgcacaccaccacacctggctaattttgcatttttaatagagacggggcttctccatgttggtcaggctggtcacgagctcctgacctcaggtgatccgcctgccttggcctcccaaagtgctgggattgattacaggcgtgagccaccgcacccagcctgaaggtaagttttatagaatttaaaatatctgaacgacctcagatcaatagaatccatagagtgtgattgagtagaaagaaggaaaggctatgaaacaaaaaagaaaactagtattgtcattgacaaaaaatgtcattgacaaagccctggagagaaaggatggcggaaatattgaaggaaaagaatgtagaactagaatataaattcattccaacagtttggcagtgtgtatcaatagccttttttagacaatgcaacattctcatacattgcttaagggagtataaattggtatactcattttagaaaatgatttagaagtatatgttgcagctgaacatatgcatgacctatcagtatcaatcttagaaatataccccctagaaaccctagaaatacttcatattttcataaaaatcctcgtaccagaaagttcatagcatcctcaaaccagaaactgcccaaaatgtttatctataggagaatggagaaataaatggcatattcataccaatgaatagtgtgtgtaatgaacaaggattatgtttcatccaagacagagatggggctttaaagagactgccacaggaacacaaagagaaaaccagagacggagagacagcaggggaaacagaatctgagatagacaatgacaaaatgggaagagaaaaaacaaggtagctggagacacacagagagacacagacaaacaggaagacagtatcccctcgtggttaacatcacagcttctgtttattaagcacctaatgtgttacaactgcacagatcccattgaaccatgggccctctccctcacctccccaaggaggcagcatgcaggagctcaactaggcagagaatccaggagtcctgaggtggttgcatgaatggacagcatacactaaatgaagaaatgctagacctgccctggtgtactgagcatgagggatttaaaggctttgggtaatgggaacacgatcatacattcatcattgtgacctgcacacccaccctgggaggctccagagggcgcacctttcactacaacaggagaaatgaatttgtgaggggagtaccagcatccttgaagagctatatgatccctcacctctgtaggtcagaaattatgtgggaatggctgacactgaagcaggaaatctcaattcagtgaggataactggataccaagatggttgaggccaagtgacgctaatttcacctaaacatcggcatggttagtacaatagacagcacagtcaacacagtaatcatgatagtctgacttcggagaactatggtgctggctagttgatcacagtgttcctggaagagaaatagattggaaaagactaaattatttctatgtaatcagaagacttcttgggtccagtgaacagaagtataatttgaatcataaaagcaaagaatcctggcccatcgttcaattcataaacttgagtcagttaccagatgttttggagattattggacactgattcttaactgacactaattacaagagacccaaaacaccactgtagtccaacaatcagtgtggcgcctggtggaggtcaggagttgtggccaaggcccatctcacaatgggtcccgtgggtctctgaacctacccttccggtatttcaccaattacagaataatgcataactgggacaggcatgctgagaaagtgacagaatttccacatgggcttccagacctgtggatgagggatgttacaccagacaagtccaggtggaagtcgctaggacttagccccatctaggctagccccacctagccccatctaggagggatcaggggttacaccaagctccggtccttcctttatcatgtggctgcacccagctgaatcccgtcgtatctccacacctagggaaatcataaaccaaaagcaagtctgcgttcctgcagggattacagaggttggtgacactgtcaatgattgaaggacgcaggagtggtggttcccactacatccacatccagttcacctatttggcccatgctgaaaacagacagatcttcggggatgatagtgagttatcctaagtataaccaggcagtgaatttcattacagctcttcatgtggcttcattgtttgagcaaataacacatctcctggtacctcatatgcagctattgacctggttaatgttttgtttcacctcaatatcttaataaaggcaaccagcagcagttcgttctctactgacaaggctttattatccatgaatatcctcttggtgtctcagtgatgatgcatccactgtcatttctgatcttactaacatgtatcttctgtttttttttttgtctttgttatcctggctacagaattatcaattttattgatcttttaaaagaaacagttgttttagttgattttctctataggttgtttttaatttcgccaatttctgccataatttttattatttattttcttaggtttgcattaggcttaaattgctctctgagtccatgggaggttggactggaagctgggattcagagtgggagtctgggagtgggtccagatagagggtgtggctggaggtgagttctttgggactggagaagatctaggggctaggtgggatgtggctagcgtctgatgggctgtggggcacccaggggtctgacctggtgtctgagggaacaatagatcatcggagatgtgagatatgaaaacgaagaggaagaacatgttgggcaggagaaaacacaagggtggtaaaaggaagtttttttacatagctgttgggatgaatttgtatctggagagattcaggtggggccaggaaggttcagctttgtcctggtttacactccccacaaaggagggatcaggggttacaccaagccccggtccttcctttatcatgtggctgcacccagctgaatcccgtcctatctccatctccagttgtgcaggtgcaacctcagtgcccacgtgtttgtcaagaactctgaggggctgacattttaccaacttagagacaaaaaagttggcctgccacaccttcacgggtattggcagaacacaccagaacctggccagagacaaaggacttgattacttgacacagcaggcagcgtgaggttcatgttcatatgggttcatcttgcccgagtcctatagggtgaccagagcagtccaggtggattttgcactcaaagtggtttatgccactgcagagggtcctgagtttcagaatcctcagtcttataagtgggcactagcaaacctgcccagcatttgccttttgctttttaaagagacaatgtctcactctctcccaggttggaagggagtggtgggatcatagtccactgcagcctcaaactcctagactcaagcagttctcccacctcagccttatgagtagctgggactacaggcttgcaccaccacacctggctaatgtatgtaggtatgtatatacttattttgtagagagggagtcttgcattgatgcctaggctggtcttgaactcctgacttccaccgatcctcccacctcagccttgaatctttgtctttggtggtgatattatttttattaccctgaaccacaaacagaattgctgcacaggggcatattatatttattgtcctggacagtaaactagtccattctgggaagacattatttttattatcctggacagtcagcaaacctgctctgatggagataccaacttgaaagactgcttgttagccagacatccttgatagatattatcgagtaagataatgttagtacctttgctcaaaatacatatagaaatgtaagagactcgtggaaatttgtcactcactactcagctcctggcctccacccttctctgctggagagccccccctttcttcccttccacctctcactcactgcacgttcctccagttctcccagtgttctgggccctgtttatgcccatggtagatataacaacagtaattcaatcgggatgagcaaaccctgccctactcttcggtgcatatgtgtgtgtgactttgactttgaaggtcctttgactttgaaatgtctctgtttggtatctgtgcatagtgaagctctgtgtgtgcatgtacatgggtggtgggagtgtgaggctctgtctgtccactacctgcccatatgtgtgcatttgtcctcaaatgcaaaacctgatgagtcaccttcaataccaagtatctctgatgtgggcactgatccagacgtagattatttcctttcctggctgcctgtgtctctagctacacctttgaccttgaatggccaaccgtgtgtctgggtactaccctggcatctgctctagtgggtccatatccgaatgcctggcctctgggactgcgcctgcaactttgaatcaccgcacactggcttctgcatgaatcgcagtgttgaccttgactgtcatatccggtcctgtgattatgtctgaattacttcggccatatttgtttctcaaatctgaatatccacagatgctatgtatctcccacccatctaacctttacagcaacctccaatttacagacgaaatggaggcacagtgagatcaaagaattttctcaaagtctcaaagctgatatttttgaatgcaggtggtcagactctggatataaccaccatactcatgtctgtgaatcagtgtctgggactctgagtgcatatccctgtctcttccctttgtaatcttattaaagacccaaccttgtacatccagaccctgtgtgcaagtgtgtacccacgtgaccttgcacacccagagccacactggaggttatgaatttaggtttgagctcttatgtccaaatctgtgtctatgaatgtgtatgtgtgtgcttacacccatgcctgtccatatttatatgcacatgtgatcacttgggctcttattatataagccacacgtacatgcatatgaatttctgcttaaggcacacagtctatatatgtatccaagcctggaaaccatcttgtgcctgtatgtatgtccatgaccttgtgtggtcacatatgtgtccttccctggcatgctgagtttggcttagatctccagattctgaggccaagaatgctaccgtacaaattgaatggacacgtctgtttgaggtctctgacatatgaaagcaaccgtctgtctaaacctgtatccagtgaacctgtctccatctccaatcacagagggaattttgccctctggtccttcatttcccttctgtctgtctctctctggctctcaggaacctatcacatgtaggataggagatgaaaggagaagttctggaaaaacaggctgcagctgtaaaacctaaagagaggagagtgcttcaaaaataacagaggctgggcacagtggctcactcctgtaatcccagcattctgggaggccaaggcaggcggatcacgaggtcaggagatcgagaccatcctggctaacatggtgaaacccggtctgtactaaaaaaacaaaaaacaaaaaacaaaaaacgaaaaacattagctgggcgtggtggcatgcgcctgtactcccagctactcgggaggctgaggcaggagaatcgcttgaacctgggaggcagaggttgtagtgagccgagattgcaccactgcactccagcctgggcaacagagcaagactgtctcaaaaacaaaacaaaacaaaacaaaaaagcaaacaaaactaactcccccaaaaaccaaagacttccggataaattgtgggaaaagcatatgtgaatggttttcacatatgtaggtactgtagggcactgggaagggtggccacataggaagaagtctctgttctcagggatcctctattcctttccgcagaggctcaggatggcaatggggaggtgtggggaggggtgagagagactcgagagagagagagagatgggcagagagatggggactgagatacacaatgacagagatggccgagagagagagatgggcagagagatgggggctgagatacacaatgacagagatggccaagagagatgcagagaaaaacagagacggggagacacagagacaagagacagagaagagagagggagatcaaggccgaaacacagccacacagacacagcagagccatataccaagagacacagagagactagatggacagatatacggtgagagaccaaggcagcccccaggaaggtggtccccaatgcctgttcatgcaacctgaaccagaaccttccctgtctctctccctctgtccccagcctcatctgaggggaaatgcccaactgttattcctgtggggcacagacacccctccccagaccccaggtccccactcaccgggtgatgcagtgagcagtagtgagcacccagtgaggatgcagcaggacgtccttgcactggaagttgccgaaatggtacaaccctgccagggttgggaaagcttctcacactcccagcctcccacagtctgggactggatggcaatcacagcatctgcagagggagtgctgggtcagggagggcaggcttggcaggagggcccagggactgggctaagagagggagctgggctgtgggtttgaagggggcagaggaccagggctggggatccagggacacaggagggcctgagattctggaccattccttggggtttgggttggtggctgttcctggtggggagactttgctctgagagcagggcaaaccccagggattagggtaggagacatgagattgcctggagcaggcattgggttgggagcaaagtatgtggggtgatttggggtcttgtctaggaggctgtggtggggagatgaaggacagagtgcttgtgggtttatgagcttcttgagtctgggatgtcctgctcctatggacaggggacattttcccaagttagcagttttttcagccaaattacctaatatgatgctacacccagatcagggtggcaggagaagagtcaggaatggggacctagggacagacacctgatccagtccccaaggcttctcctcttcctggtcagcactctctgaagacagtgggtctcttctctactggttccatgtctctgccattagctcagattccatcttcttgtccttgtctttccgtctccatctctgtctgtctctttgcatgtgtatatttgtgtgtgtgtatcttattttttttctgtttctctaaaaatcctgtctgagagaaactttactagttgttctagaggaaggaagtcttaaggatgagctttctgaattagttctggcatttctagtgtttggaattggttctgtaatgcgaataaattaaaggcaccacaactctattttcagtaatacaaacagaaataaaagtccgtggtgtaatgtggcaatagagatatgcaaaataacaccactggatattccgaatcaaataaaggagaaatgaccagggtgatcatgtatatgacactttagaatattttttaaagtaacaagcataatgaaattggatgattgcttctagttgtgttggcaaaagtggaaaaagaaaagaatgagcacaggactttaaatttccagatctcagactgaagaaataatctaaagttgctatgtctatgatgttgaaagaaacctttatctcctgtagccacagagctgagatttctgaaaatcaaacctagaatcttattgtgtgagtggctgaattacagtgctaattaaatcctcagcatgcatgctgtctgccattaaagtgaaggcataattgaaagggtagggatcccaaaagttggaatgaagacatgtgggaagactctgattatggtcaggagactggggaaagggtctagttagaggatgtggcctgaggctttaaaaatgaagatccaggggacagatagaatgtggccagtgtctggcaggatgtggggcacttggcatctatcctggtgcctgaggaagcagtgaactctcccaagagggagaacccaagaggaagagcatgttggggaggaggagagacaaatggcgaaaggaaatttattatgccaaaggtgggatgaatttgtatctggaaggatccagctagagccaagaaggttcagcttcagcttggcttacactatccccagaaaagttcaactcagccttgttccctcttctgttattttgctgtgcccagctggggcccctcctaactccaagggccaagaaagttcaacttcagcttggcttacactgccctcaaaaaagttcaacctagccttggtccctcttctgtcatgtggctgtgcccagctggggcccctcctacctcccacccttccatctccagctggacaggtgcagccttagtgcccaactgtttgtcaaaaactctgaaggggctgatattttgccaactggcaaacaaataagttagcctgccacagttttatggatactggcagaacacactggattctggatcaaaggcaaaggactttattactcacagcacagaagacagcatgagctttgtgttcacatcagttcgccttgaccctaagtcccacaggaatgatcagagaagtttaggaggatcctgtgacacgatgctttgacccacagctgagaaacctgagcttaggaatcctgaatcgtatgaagggactattaatatttgtccgagagggagacacattcttcgttatcccgaccacaaacagacctgctctggaggaacatactatatttattgtactgaacactaaacaaatctgctttaagggacacattattacactggtcggtaagcaaagctgttttgttgaaaataccatttgcaagatggcttgctagccaaacatccttgatagtccaaagcaatttttttttcactttgaagccatgtagaaacatgagaggcccatggagaattttctctcagaatcataatttaaattctctaaccttccctgcaaaacaaacttatactttcttccttataccccttgtctgccacatctgttaccctagcctcaccagtgtgccaggcccagttcccaaagatggcaggaaaaatatggggatctgatctggatgtgccctattgttgctgtctgtttatgtgtggatttgactttgaggggacatatccacgtttcccagtgtagaggctcagggtcttctgactgtgaaaagtccttgtttggtacttgtgcgtagtgcagttctgtgtgcgtgtgtgtgtgttgtgtgtgtgtgtatgtgcatgcacatgtgtatgtggtgggtgtgcaaggccctgctgtccactacctgcccacacatgtgagccatgtccccatatgggaaaactgatgagtaaccttcaacaccaagtgtctgacttggggggtgatctagagacagataaatctttcctgtcccagctgcctgtgtctccagaatatgtctttccccataaatgcccaactctgtgtctgggagtagccaggaatctaacctatgaagctgtatttgaatgtctggcccttggggttggtgtctgcaactctgaatcaccactaagtggttttatggatgaatcacagtattagctttgactaactttatctgggtctgcacatatgtctgattttggctatatttgttttcaaaatctgaacgtgcacacgtatgtaccataactaagtcatgtgtccttgattaaaataactgatatttattactatgcattacagttactgtgtgccaggcattatcatgcacacccacacacaggcatacacacaaagacacatttttctatttaagtcttaaggaaacccccatgaacaaatgaggaaatggaaagacattgaggtcaaataattttctcaaagattcagaaataatatgtttgatcccaggtggtcatacttttggatacaaccaccatactatagacccatgtctgtgaattgcttttggaggggctactcaggatatgtcccctcaaagtcaaacccaacactgcatatcagtgtctctctcctgtgtacctttactaaggcccccaccttgtacgttcagaccttgtgtgcaagtgtgtgcaactggaacactgggtatccagacctacagtggagtgtagattttggtccaagcttctatgtccaaagctctgtgtgtgtgtgtgtgtgcgcgtgtgtgcgcgtgtgtatgcacacatacacctatgtcttttttttttgagacagagttttgctcttgttgcccaggctgaagtgcaatggcatgatcttggctcaagtcaacctctgcctccctggttcaagctattctcctgtgtcagcctcccgagtagctgggattacaggcatgtgccaccatgcctggctaattttgtatttttagtagagaaggggtttctccatgttggtcaggctggtcttgaactcccaatctgaggtcatccacccacgttggcctcccaaagtactggcattacaggcgtgagccactgtgcctagccacacccatgtcttaactgtccacacttacatacaaatatcaatgtccatatagtgaccctcgaagctgagatctatttatatgttacgtgaaggtaagctgtaaatgctgtacctaccaatacctaagtttgaaagtctggttgtgcatatatgtaggtccacaatctagtatggccacatctgtgcccttgtatgaccctgagtttggccgagatacccaaactctgggaccaaatttgtgtgtcatacatactgagtgtcacatccatttaatatctgtgacagatgaatgagcctgaatgactggctccaagtgaccacttgtctgaactcactgtatccagtgaccttatcttcatccccaaccacagagaacttcttgccctctggtcttttcccctttctctctcttttgggaacctataacacatgagatgggtggtgggaacaaaaaaggatacagttccagggaaaagaggcaaaagttttttaaagctagagagaaaacagtattttaaaaacatatcagaggctcctggagaaactgaggggaaggcataagtgaagaatatgtaggtagataagggcacagtcagggaataggaggtgagaaggaccctgtcctcatggatcctctactcccatcccagaggcctaggacggtgactaggtcctgggaactgaggagtgtatgctctgctcccaatcttggcaagtgattttctttgaatgtggacattttaactgtggtccttcatgcactgtcccccgctgtgagctctctgaggcccactaccaaacctggtaagaaggcaggggtcagggtcctgaaaaacgtggctgggagtaggaacccatgggttctgtacctggagttggagaaggctgaaagccgggagtccaaggtcttggagaaggaaaatgttgggattctggactcctgtattttaatgggttggggagagagtccttgactcctctgaggacaaaagtactggagcttggggactacagcccaatgggtgtgtgcccacacattggaactcttagctatctgagaggcaggagtaggggccattggtaccagggcctcaggaggtggtaagtggaatttcagattatcacagggcttggggatcccagattgctaacatttgggtctttctgtctactccacactcagcttgtgggtaaccactggcctgctagctccctatagttgctgggccagcaggagcccgacgagcaggaactgcgcaagcgcgctggttctaaacagctgaagggcgtttggcgcatcttctgacatcatcagcactatgaggatcccggcgcaccactatggcgtcacttcggcgcaactagcccaccatcacccgtgcgcctctccagtcacatgtatcacatggcactgcccacgtctgcccccttgtgggtgtgtccaacatggtggctgacttaggctttgtgtccatagggaggagcctaggaccacagggaggcttgggtcacaagatgcttgagaaaagccagatgtgtccagtctatgaaacctgaaatacatggcttttgggaagaggggcagggtcctgaatgtatgggtccttctcaagttcacggtcttccctggtgggtctccttgataattgtattgtgccaacatcagcataatttcagacacatctggtaacatggactacccagggcacctgatggacaccttagtgtgtgcatgtttggagggcggaggcgcaaatgatcctaaaatcttgatcttggttactaatgttgttggctgttcccctaaactgcacatccagggcaaatgttgatttgttgcatcctagaccctgccctcagctacacccctgtctccaccacaatccatcccaacaccatcctcatccctaactttgtcaccatctcctgcccttgagagctgatgaaaaggaacgcccagaaaatggaacttacggccaggcgcggtggctcacgcctgtaattccagaactttgggaggccaaggcgggtggatcacctgaggtcaggagttcaagaccagcctggccaacatagtgaaaccccgtatctactaaaaatacaaaaattagctgggcatggtggtgcgcgcctgtactcccagcttcctggggaggctgaggctggagaatcacttgaacccaggaggcggaggttgcagtgagctgagatcacgtcactgcactccagcctgggcaacagagggagactctgtcaaaaaaaaaaaaaaaaaaaaaaaaaaaaaaaaaaaaaaaggaaagaaaacaggggatgtgtgcagaaaaccaggagatatagagtcaagaagcatcagaaaaaaggtcaaaacaaaaggtcaaaaagggcccccgccaacaacaacaaaaaagaaaatggaagtcacctgccaacattacctagttacccagaggctgagctgggattcacacccagggctgactaggtctttctcctgcatctcctccccttttcttggaacacctacgtctctcaggttatcctttccttccgaagcttccacagttggctcaaacccagggttctgagataacctagtctccctgactccatggaggctctgcttctcattcagacctagcaaaatcatctaaagctcactccaccaatattgagctcctagccagaccttacaccaaggtaagccctggcccatgctcaagccccacccctcctaaagtcttatccctgctcaagccctgcccctagcccaagccctttcctctgtgcaagcttctgaccaaggcgctgccctctgctcaagccccaccccttatcaggctccacccatcccaaagccgtaatcctgctcaaccccacccctgctcaactccacctgtgccccaggccctttgcacaaaaattagctgggcatgatggtgcacacctgtaatcacagctactctggtggctgaggcaggagaatcgcttgaacccaggatgtgaaagttgcagtgaaccgagagcatcatctctgaccaaggctctgccctcttcttaagccccatcatgcataaggccccatccctgctagcctgccacccctggcctgggactctccttcactcaaactctcctccagccagcgcttgcctcttagctggcgctctgccccagacccacccagcactcacttctggaggcagtgtgcagccgacagcacccactgtggatgctctaagatgccccagcgtcttaaagttttccactgacggtgctggctgcctgccagggctgcaagtgcagactgtattcctgttgccaccaatgaggactttgctggcactggagaaagtgcttgggaatggagtctgggatccttcagggggaatcacagctcctggggatggaatcaggacacaaagtggaggggttcagagtcgagggtcagggttaggattaggaaggtgtgggttgtattgaggggtgtgatggttaatatcaagcatcaacttgattggattgaaggatggaaagtactgttccctgggggtgtctgtgagggtgttgccaaaggagattaagattttacttagtggactgggaaaggcagacccaccctcaatctgggtgggcaccatctaatcagctgccagcgtggccagaataaaagcaggcagaagaacgtggaaagactagactggtttagcctcccaacttacacgttttcccctgctggatgcttcctgacctcgacattggaatccaagttcttcagctttgggacttggactggcatctttgctcctcagcttgccgacagcctattgtgagacctcaccttgtgatcatgtgagtcgcttatccttaataaactcccctttttatatacatcaatcctatgagttctgcccctctagagaatcctgactaatacaggggggaaaacatgggcagggtatccaggtctgctttttgggctggggcatgatgaggctaaaggacatgtcagttcttttttttttttttttttttttttggagacagagtcttgctctgtcacccaggctggagtgcagtggcgtgatctcggctcactgcaagctccgcctcccgggttcacgccattctcctgcctcagcctcctgagtagctgggactacaggcgcctgccaccatgcctgatgcctggctaagtttttgtatttttaatagagatgggatttcaccatgttagccaggatggtctccatctcctgaccttatgatccacccgccttggcctcccaaagtgctgggattacaggcttgagccaccgtgcccagccaggacatgtccgttctaaactccaggcccctggtctgtccctccgatacctcctcttacaccatcctcagacacacagtttcttttcttttcttttcttttcttttcttttctttgagatggagtctcactctgtcgcccaggctggagtgtggtggcgcagtcctggctcactgcaacctctacctcctgggttcaagcgattctcctgcttcagcctcctgagtagctgggactacaggtgcctgccatcgcacccagctaattttttgtatttttagtagagacagggcttcactgtgttagccaggattgtctcgctctcctgacctcatgatccacccacctcagcctccctaagtgctgggattacagggtctcccagctaataaatggcagggcagggctttgaacccaggcagggcaactccacagcctatttccttaaccactgtcccataaggcctcccaaggccccagtgagcagggcatgactaaacatgcagctacatgtcagaaccctggagtcaggctcagggacacaggaccaggtgacaggcacaggacacaacctcccatgtgacatcacgcttggctacacacactcttgcaaagctgcagggtgactcatacaatgtggtcacaccatgatacacacagcacatgacactgaaccagataggtacaaccacaaagatccagtcacatggtaaattacagtgatatcataatccagaaacagcctcggatgaatggaaatgcctattcaccccaatacacaaaaatcacacaagtacagccacacaagcacccccatacacacgtcatacgggcatgtaaacttagaagcaaccctgtctgcttgaagacggtgacactttgggacatacacatcacacacgcaaagccatggaccaaattgtgtccccccctctccagacttatatgtcaaagtgctaagccccaagatagtggcatttggggctgggacccttgggaggtgaggagggttagctgaggttgtgagggtggggccttcatgatgaaattaagtgccctaatatgaagaggaaaagagggagagagaattgaaacctgctaaacctcagacttggactttccggtctccagaatggtgagaaataaatttctgttgtggaagccacctgtctgtgttatgttgttatgggagccagagaagactaagacacacacacttacaccactctcccaccacacacacacaacacacacacctgtgacattgtggacgacatatcccaggagcctggtgcagggggtttctgctgtggtcatcaggttggcacctggtggggaggggattctgggattctttagccgtctcccttctccaccctcccacagaatctctgggcagcaacagccataagggatcctctccaccttaggcggtgagaccctgaaaccataacctagggcagaatttctcaacctggccgctactgacacttctgattgaatcattctttgttgtgggcactgccctgtgtgctgtaggatattacgcagcatccctgccctctgcccactagatgccagtagcaccctccttgccaagtcatagcaaccaaaaatgtcccactgtccagtggtctctgggagaagtcagtgttagcaacatctggaatgagagggagtgatggggagctggagagatggaaactcagagtgcaagaaaggcaaagaaagtcagtgacagaaacagagaaagttagatagggatagagacacagagacactgatacagagacaccaagatggaggctgggggagacagagtcagaaagctaggatggggaagatggaaacacaggcacaaagagttctcagggtcagtgagtctgaaaggtatggagacggaaatacaggtgttgacagcagacacagcctacagcctctgtgcccaggcattgttctaagcacttgacatgcagtaattcactttcataggaaccttacctggaagatttgattattagccccatttcacagagttaagtatcagagaggttaagtaacttgccgaaggtcacacagctatcagcagtttattccatttttactgctgaataggattccattgtatggatgcaccatggtttatctgtccactcgccagtttatggaacgtctgtcactgctttaacactgcaaacttccctctccccaatcttccttattatttaacttattatatatgatttgtactaatttacaatattatgttaacacatataaatgtatatctaatttgttatttattttattggatgtattttctattgtttgtatctttcagctacaacaagaacaaggatctttgccagttttgttcactggtttatccaaagcccctaaaaccctgcctagcacatagtaggtacctgataagtacttactgaataaatgagaatgaatggatggccacaaactctttctatcactgtatttctcagttgagcttctcggtcagggtactgcctctctggctgtttctgtctttgagacagacaactaacacacacacactctctctctctgtttatatctgtctctctgtggctgacactctctccatcactttttcctgtctctttcagtagatctctcactggagagatctcttagtctctagagggtggttggggtcttgtcaggggtctggggttgggaatctagagcagaggaatggagtttggaggctgggtctgaggtctggagtcaacctccagaatctccagtttgtgctgtggaatctagagcttggaatctgaattctgggattttggggtttggagtgaagcatctggaatctagacgagacatcagcaaactatttctgtagaagtccagaaagtaattatgttaggctttgtgggccagacagtctgtgctgtaattgctcatttctgctgtcccagcataaaagcagtcatagacaacacaagaaggaattaatgtatgttccaacaaaatgttatttacaaaaacacacagcagctggatttggcctgcaggggtgatttgtttacttctgattaaactggaacctggaaaatggaatccagaaatggaagtcttggttctagagtccaaagactggtctgatatctagagcttggaccacaagtctgatctccaggaagatgaagctcaaagtctagaatctgaatttggtgactgaggtcctcattttggagttaagatttttttatgtagatcacaagagactgtcacttcattgcagtacagtttagccctgaaattggggtttagccaaggagggttcttggcttcacttaggaaaggattcaagggtgctggtagtgtgagacagcaattttcgttgaatggtgctgctccttgcgaagcagggctaactcataggcaatgtgcccagagtcagccacctatgggctcttggcaactatatttatactcatgtaaatccactttcaattacatgcaaattaagtaatgggtcaatgtaaattgaggggtcatttatttagaactttctaggaaaagagcagtaacttccaggtcattggcatggaaaggagcagtaacttccgggtcactgccatggaaaggggaggtaacttctgggtcattgccatggaaaggggaagtaactttcaggtcattgccatgacagtttataaatgccatgacactggtgagggtgttctataccaatgagcaatgagagcagatagggatcacttttgtcttcatctggtcattcctgctggttttttttttttttttttttttttttttttttttaagatggagtcttgctctgtcgcccaggctggagtgcagtggcacaatctcggctcactgcgagctccacctcccgggtttacaccattctcctgcctcagcctcccgagtagctgggactacaggcgcctgccaccacgcctggctaattttttgttttttagtagagatggagtttcaccgtgttagctaggatggtctcgatctcctgacctcgtgatctacctgcctcggcttcccaaagtgctgggattacaggcgtgagccaccacacccagcctttttttttgtttttttgttttttttgaattttatcctgcctggacttgttttggtcagcagggttgtgaccagaaaacaagtcctgccagtctcctacctgacctttataaaacattgtctggataatcatgaaaagtcgtttggtctagttgtcagtataacacagagagagaggtcttcccttcctaccactggggactcctgcctgctccctgtgactcaacatgtttctacccaactaactgaggtctggcatcgtcctatggagttgacctgaactgtctgtcttttcttcagagcaaggagtgccgcaggggcccaggtgtcaccattttgttattataggcaacccctccaggctgcttgtagaaccatctaaggcaaaattactgatcaagttcatgtctatccaggtaaacctgagatgagtaaaatgacctgtccatccattcactaaggtcttatgaactgtccactcatcccctgaggtcctatgaatgtttttttcttttagagacagggtcttgctctgtcacccaggctggtgtgagcatagctcactggagccaagaactcctaggctcaagcagttctcctgcctcagcctcctgagtagctgaggctataggtgcacaccaccacacccagctaatttaaaaaaaattgtagacatggagtcttgctatattgcccaggctggtctcaaactcctggcctcaagcaatcctcttgcctcagcctccaaagtgctgcaatgcctggtgcctgtgaatttttttttttttttgagacaaagtcttactctgttgcccaggctggagtgcagtggtgccatcttggctcactgcaacctccacttcctgggttcaagtgattctcctgcctcagcctctctagtagctgggattacaggcacgtaccaccaggtctggctaatttttgtttttttaatagagacagggtttcgccatgttggccagactggtcttgaactcctgacctcaggtgaaccgcctgcctcggcctcccaaagtgggctaggtttagatttctatatgtagaaattgtatagataggttaatagtgttatggaaatttatgtcctcattcttttttattgtggtaaagtacacaaaatataaaatttacaattagtggcatttaggacactcacgatgtacaaccctaccagtattaatccagaacatttttattaccccaaaaggaagccttgtacacattagcaatcactccccactccccccgagccccagctcctggcaattgctaatctgctttctgtctctatggatttgcctattctgtatttcatataaatagaagcataattcagccacaagagatggaatggaataattcagccttttgtggctgaattatttcacttagcatcatgttttcaaagttcatccatgtttagtatttcattcctttttgtgactgaatattcattgtatgaatatgccagaaattacttatccaatttactagttttacctgttggattgattgtttccagttagatgctgttataaaaaaaaaagcttccatgaacatatatataggcgcacatatatagagtctaaatcattatatatatcctatatattgcagatatgcataagtttctttagtgcgtatactcaggagtgaaatttctgggcattagatatgcatatcttggccaggtgtggtggttcatgcctgtaatcctagcactttgggaggccgaggcaagcagatcacctgaggtcaggagttcaaggccagcctggccaacatggtgaaaccctgtctctattaaaaatacaaaaaattagccaggtgtggtggcagatgcctgtaatcccagctactcaggaggctgaggtatgagaatcgcttgaaccagggaggcagaggttgcagtgagccgagatcgtgcaactgcaatccagcctgggcaacaagagcgaaattccgtttcaaaaaaaaaaaaaaaaaaaagatatgcatatctttaccatttctacttgaggtcatggaaatatcctcctaaattatgtcctaaaagttacattgtcttgccttaatcaggtctaatctacttggaactgatttccgtgtgtggtgtaaggtaggagttcaatgccattttttttccatactgatacccaattttcccagcaatacctactgaaaagacattttctccactgctttgcagtgtgatttctgtttcacataaagtgcctataaatgcataggtctgcttctggctctgggttctattctattggtatgtttgtctatgtctgtgctaatatcacacttctcgtgataagttacaagtagaaaaggctaccctccttgcttttctttggaagtgtgctggctgacctttgcccttgccctttcttcttcataaattttagaaacagtctgtcaggctccagaaaaatcctgctgagattttggtttggaatacattgaattttaaaataaatttggagatatttctcctctttacaacattgagttttcccctccgtgcacatggaacaatatatctctccatttattttggtctttcttttctttctcccctcccctcccctcccctcccctcccctcccttcccctcccctaccctcccttcccctccccttcccttctcttctttcgagatggagtcttgctctgttgcccaggctggagtgcagtggtgcgatctcagctcactacaattgtcgcctcccgggttcaagggattctcctgtctcagcctcctgagcagctgggattacaggcgtgaactgctgcgcctggcctttggtcttctttaatatctctctatggtattggatatctttgaagacttatttttagggtcttcatggattttacattttttgattttttaaaattttgtggcagttacatagaaatgcagttgattttttattcatttgcttccaacaatcttgctaaatgatatgattatttctataattatttattgattatttgggactttctgcattcacaatcatatcaactaaaatgttttattattatttttttgagacagagtcttgctctgttgcccaggctggagtgcaatggcgtgatcttggctcactgcaacctccgcctcccaggttcatgtgattctcctgcctcagcctccagagtagctgggattacaggcacatgccaccatgcccagctaatttttgtatttttagtagagacggggtttcaccatgttggtcaggctggtctcaaactcctgacctcaggtgatctgcccacctcggcctaccaaagtgctgggattacaggtgtgagccaccacgcccggccagctctttttcttctataattatgtgcttatggctgcatgtttctctccgagcactgtagtaggcatacgcaatacatgtgtatacatctggtattttccttagcatttaattccaaatattttctaatttccattatatctcttgtttgaactctgggttctttagaggtgttcttttaaaatcaaaacgcacagtcctagatgagataactcagaaacagccagtcaaataccacatgttctgtcttataaatgggagctaaacagtgggtacagacaggcatagagtgaaataatagacactggagactccgaaaggtggaagcatgagagggggtgaggcgaaggaggaaaatgacctgttgggcacagtgcacactacttgggtgatgggtacagtaaaaagcccagagttcaccaccacacaacatatccctgtaagaaacctgcacttgcgggcggggcgcggtggctcacgcctgtaatcccagcactttgggaggctgaggtgggaggatcgcctgaggtcaggagatcgagaccatcctggctaacacggtgaaaccccgtctctaccaaaaatacaaaaaattagccgggcgaggtggcgggcgcctgtagtcccagctactcgcgaggctgaggcaggagaatggcgtaaacccggggggcggagcctgcagtgagcggagatcgtgccactgcactccagcctgggcgacagagccagagcgcgactccgcctcaaaaacaaaaaacaaaaaagtgcacttgcactccctaagaccattttgaaaacacatgaggattttctggttatcatgatttctagcttaattacattgtggtcagacaacatactctatatattccaacttggaaatttgttgagacttgcttcgtacctcagtaacaggttcacttttgtaaatgctatgtgtggtttttaaattgaggtaaagtttttattgaggtatgcacagtgtggcgttagagttcaatgagttttggcaaatgcatactcatgtaatcctcactcctgtaaagttatggaaaattcccatcacccgagaacgttcttttacccttattcccagtctgttttttttttttttacttttatttttgagatggagtctcactcttttgcccagactgctgtgcagtggtgtgatctcggctcactgcagcctctgcctcctgggttcaagcaagtctcccacctcagcctccagagtagctggaattacaggcccccaccaacacacccatctaatttttttttttttttttgagatggagtcttgctctgtcaccctggctcgagtgcagtggcgcgatcttggctcactgcaacctccacctcctgggttcaagtgattctcctgattcagcctcctgagtagctgggattacaggcacctgccactatgcctggctaattttggtatttttagtagagacggggtttcaccatgttggccaggctggtcttgaactcctgcccaccttgtcctcccaaagtgctgggattacaggtgagccaccgcacctgaccccaatctgtttctatacctattcccctctcccatcccagcaaccaggccacattgaataattttgcctgttctagaatttcatataaatataatcatatagtgtatcatattttgtgtctggcttctttcactcagaataatgattttgagatgcatgtatgttgttgcttatatcaatagtttatttctttctggtgcagagtagcaatccattgtatggatatatcacagttcgcttatccactcacttactgatagacatttgctgcatttccaatttcattattatgcatgaagctactataaacattcttagggaagtgttttctatggctattacctaaatacctaggagtagaattgctagccgtcatgtggatgtatgcctgtctttctaagaatctgccaagctgttttccaaaatggttgtagcattttaccccctacccccagcaatgtaggagagttacagctgctgtagatataaccaagacttgatgctgttattcttttcaattttagccattctggtagctgtatgtcttttgaaatgattctatatttttcagatactgggtgcaacattccatatatgaccattaaatagagtatgttaatcatactgttcaaattatctatatacttattcagtctcccatctccttgcccctcagttgccccattgtgcccctcaaacttccctctttctactccttggtctctgttgctgtcactcacagtagccctcgccacaattctccccactagactctagctgcagcagccaacttctgagacacatgcaaattaaaaattcttgaaatgcagttaagaagacaaaaatgaatatagatcaactaaagctgaatagttaaactaagcaagaaaatctctacggttaccatttgctgacctgacttttcagaaactggacaacatccatggcactggtttctcttaactatccagggaatggcccctccctctgaaactctgtggccctcctggtcaaagctcgcatttcccagatagggaaatgcgacccatggagggaaagccatttgctggaatctcttgaatggaaggggaagcaaggaggacactacaaacagaacctgcgcttctcttagactttatttctggatctaggggaaagggacaaaaaatgaaaaaccaactggtaaggttgggtcaacgtgccacaagggggcactgtgtacagggagagtctaggtggcattggaccgctgggtctgagggaggaggggctgggacctggacctctgggtctggggaaggaggggttgggggcctggacctctgagtctgagggaggaggggttgggggcctggacccctgggtctgagggaggaggggctggggggtctggactcctgggtctgagggaggaggggctggactcctgggtctgagggaggaggggctggggggtctggactcctgggtctgagggaggaggggctggactcctgggtctgagggaggaggggctggggggtctggactcctgggtctgagggaggaggggctggggatctgtacccttggtttgagggaggaggggctgggggcctggactcctgggcctgagggaggaggggctgggaacagatattcctgaattccttccgcaggatgtatttgggggtcaatttcatgggttcccagtccccagagttaactggcctggacggttttctctatccactcagtgaatttgcagaggttggtgtagacacctggcacgccaacttggccacacggggcttttccgaaagacacaaggccctgcaagtacccgttgcagatcaggggccccccagagtcaccctgttgtgaagagagggagagtcagaattcaaaacacagagaggtggaaatggatgtgggctcagaaaggaactaaatgagactgagaaacaaagacagaaccatcatcaataacaacatagcccagcaacatatctgttggaagtcccattccagatccctgacttcatctaatcctgcttcccgatgtcctatgtcctgaatgctggctgcttctcttgggcttgtggtctgtctgtttctgtttgtctgtctctcctttgtctcctttgtggcttgtttatctgtctcagtgtctctgcatctctttgtaaagtcttttttttttttttttttttgagacagagtcttactctgttgccccagctggagtatagtggtgtgatctcaactcacttcaacctctgcctcccatattcaagcaattcttctgcctcagcctcccaagtagctgggattacaggcgcctgccaccatatccagctaacttttgtatttttagtacagacaggatttcaccattttggccaggctggtcttgaactccttacctcaagtgatctgcctgcctcgcctcccaaagtgctgggattacaggcatgagccaccctgcccagcctctttgtagagtcttgatttttcctgtttctcttcgtgtttcacctctatgaatctgtgtcactgtttccctctgggtacacagttgacccttgaacaaccctggtttgaactgcacaagtccacttatacttggattttttcaataaacacattagaaaaattttaggagagttgcaacaatttaaaaaaattcacagacgaactgtgtagcttagaaatatcaaaaaattccaacaaaggtatatcatgaatgcataaaacgtatgcataaatcgactatttatgttattggtaaggctccccgtcaacagtaggctatttctagtcaggtttttggggagtcaaaagttataagaggattttctgttgggtggaggtcaccgccctcaggccccatgctgttggaaggtcaactgcatttctatgtgtgtgtgtttctgcctccccatgtctgtttctgtttctctcttcctttgcttctctttattcctgtgtttatttctctgtttctctcagtttctctctctagttgtcactgtctccctgtgtgtctctccatctctgcatctcgccatgcggccctgtgtgtctctgtctcccccttctccacccttccctgagtcgcctgccctcccctttcccctctctcacgttgcaggagtccttctggtcttgccctccgccggcgcagaacatgctggggtggtacagcgggtcatagagcttactgcagacctcctcagacaccaccgacacgttcacgcactgcagcacggtaggcattctgcctgggacgcagagctctgggtcagcccccgcgactgggcagaggacctccttgaagagggcagacacacacccgtgagctcaccgttcgccagcagaccccagccagaaacgaggcaagagttccccgcggtagggcactgcgaagcaatgctgatgctccggatggtgtcagactcggacacggattcgtccaacttgatgagcatgaggtcgttagcgagcaagggtctgttgtactctgggtgccgtacggagaggctggcctccaccatctggctccctggctcttggtcggcctcaagactgtgcaggcccagcccgatggtgtaggagctgtgggccacggagggcaggtcagttttgtggcaactacatccttacctccattctcatcttcaaccccattcccatccccatctcctaaccccaaccccaccctcttcgctaaacaccctaagagctacttaaccatggtctcaaatcctcattcacaaaaattcagggacaagaacttgccttagttcactagagactcagcactgggctgagatttcaagtcaggactctctgagtccttccgaagcaagattcccgcctcccagcccttccctctggggctccccggatccaggctcattccgtcctcctcccagagccttcaccgctgtttccccctgagcaccccaagatgagcctgatattaggccccgcccccggacccaggccctgcccactccccctacctctgcactcacttctggaaacagtgtgcggctgacagcacccactgcggatgcaccaggacgcccgagcagaacaattcgttttccatgaccagtgccgcctgccagggctgcgagtgcgggctgcagtcctcgccgtttatgatttggctgcagctaccagagacgagcgatcctgagggcggagtcagggatgggatcgggaccaggaggcgggcccagggttcctgggggtgggcttaccgagcaggggcgtggtcagaggttcaggagcagtcagggctcctcggggcggagtcagggctgggaacgggctcaggaggcgggcccagggctcttgggggaggggttaccgagcaggggcgtggtcagggcttcaggagcagtcaggactcttggggggccgagtcagggctgggggcgggcccagggggcggacccagggctcctgggggtggggttatggtgcaggggtcatgatcggagcttcaggggctggtccaggatataggcctagggctcccaggggcggtgatcacggtgcaggagcctggtcagggattcagggtagtcagggctcctgggaggagagtcagggcatgggggtgggctgagaaggcgggatcagtgctcctagggttggggttacagcgcaggggcgccatcaaggcttcaagagctgggttatggctagaggcagtctcagaaggtgggaccagggcttctggggcggagtcagggctctggggtgagctctggaggtgagactggtgccatcgcggtgcaaagccacggtcaggaggggttcaacagaggagtctaggctcatagcagtaggatcgggtccttcggggtgaattaaagctcagggggtggagttgttgctgggagcaaggatcgggtcacttgtctgcgcagactgatgctcaaagagtcggtcctgcgccgagtcactcctatcctctcccagccttgcccacagtcacaccaagccacaagcccatgcacaccaaaacaccgttttatagtcctgtgaggtgagttccttggggatgggagagggggatctcaggactgaagacccaggaagcaggcacagattcccagcaatggatcacgccccaggaagcacaatctcctgcaccctcggcttcccctgtccccatatcatcattacactgttgtcactccaccagatattcagaggcacaaactgtcagagtctcacaggtacaaccacacacccaggcacactgccacacacaaatttaccacgatacaaggagttgcaggggcacagccatgggggacggataacacggtaccgtctcacaggcagctttgcagtcacaagcaagaggacactgagtcacacctgaacattaacaaacactgtgcccccaagcacggacagacacacacacgcatactcagatacctgcgacaccaaggatgaggtaccccaggaaccagccccagggatttcctgctgtggccatcacgtcagcacctggggatgaggactgagacttagccgtgtctggggatcttcagcccaagtctctccatccctctctttgtccctccctttcttccctctgggacgttattaggtaggcaagagcctagaccatctaccccctctcccatccatggacccagaacctagagagacagatttagagactgagagagaaaaagagagagagagatgggaaaagagagagagagagagaactaggtagaaaggaaagtttagagaaagcatctagccatctgtgaatggggagagatggtgtctagccacccacaaacaagcatggagggaagacacacagagaatcagagccggagagacagagtgcttgagagatatcctcagagacagtctgagagttagacatggagatatagattcagagagacagagagacccctaactagagacagtgactcctaactagagacagtgagagatctgtctagagagatgtggagacagaaggcacagaggctgagaatccagcgacatggagctgtagggagagttggatcatgaacactgcaggcttttagtgggggaccaccaggcctcttacccggccacctctgggctcctggattccactgctgggctgagctccagcctgctgcctcccgcaggggcctccttggggcttataagcatcctcagcctgggctggcctgcccccaggggatgtgttccaggggtcaggtgctgcaaacttccagctcaactctctcaggctgcctcaactctgaccaggcagtggttgggggcccagaaggggctggcagcagggtctagggacccagggaggagacccctgcccagatcctagactccactctcctttttctttctctctctctctctcattctttctcttttcatgttcttattctctctcatgagatacctctctcttgcctgtatctctcattttctctttctcttcttctttctttctctcattctctctctcattatttttctcgtgttttctttcatttcctctcattctctcctgttctctctcatgttctttctctttttaaattaaatctctctctctctctcccctcctccttcatccctctctttctgtgcttctccagcaaatttccccaggttcgtatccagcctacatcacgaactatttttggaaccttgggcaagtgactgcacccctgtgagcctgtttttccaactgtaaaactggagtgaccattatgccccatttcccaagtggattcaaagaggtaattcagggaaaggcacacagtgccaggcacattgtaggctctcggtgagcgggagaactaaaaagtcttcgctcagtgaaaagcagctgagtgcctaccacactccgagctctgcggcaggtgctggggccacaggaggaaccagcaaagtcctcgtcactggggatcgcgtcctacccgggggcacagaccataaaggaaaactgcagggaccagcatataaggtggtggtcggggagactcagagaaggggaacatttaagctgagatcccagggaagaggaggaggagggtcgccgcagcaggggcggttgcggggtgcaggggagaacttggctccagccagaggagggcagggcgggtaggagggcagggcgggtaggagcgcagaccgggaaccgggcgggcctgcaggagtttacgtaccaggattaaggagcttgggttttacttaagtgcaatggattttaagcacgaggatggagtgacataatcttatttactttttaaaaacttccagcttggagagtgatggtgggggcggggcggggggcagtggcaacagcccaggtgggaggtgacggggtcaagggagaagagaggtgaatggacacggggtcccctctgcatgtggagccaagttactgcccgatggatggaaagtggggggccaggagcagaggggccaaggatggcgtggaggcttggtctgctggcttgcgctctacggatcttgtggagacgcataggtgcgggaaggggggtggggggtgagagggtgccgtagaccgcggagggtgcacggaggggcaggccgaggtcaggactgccgagaaacagcggggactcatcaggggagaggtggtgtttacagccacgaggccgggtgagatcatccaaggagtgggtgggtgtagaccgcggagccggcgcgggtgagggatagtgcccgcaggtgaccgcgacgaggcaggaatgtctctgtgtctctctgtctctcctgggtctctaacactctttccttctccttccttacttctttcccccacagcccaccccgtgtgtctgtctctctttctctctggctctcttttcctctgcctctctggtcccatctctgtctctctcccccttgtctctgtttctctcacctgccagactggaagcatcccaagtgagaccctcccccaactctgtcctgggcccgtgcgcccccagataactctgggcaggacgggacataggctgggaccacagaacaggaagccctggcaggtttctgtctctgtctctcttttccctgtccctgtccctttctctctctgatcccttctctctcgctctccctctgacctctgtctgtgaccctctgatctctgtctgtctctgtctgcccctgtgtgtctctctttcctcctgtctctgtctcaccttgccttctctctctgtctgtgtctctgcacctgtgtctgtccatctttctctgtgtctctctcctcccatctctgtctctgtctgtggctccgcacctgtctctgtccatctttctctgtgtctctctcctcccatctctgtctctgtctctctgtctgtctccgcacctgtctgtccatctttctctgtgtctctctcctcccatctctgtctctgtctctctgtctgtctctgcacctgtgtctgtccatctttctctgtgtctctctcctcccatctctgtctctgtctctctgtctgtgtctccgcacctgtgtgtctgtccatctttctctgtgtctctctctcctcccatctctgtctctgtctctctgtctgtgtctccgcacctgtgtctctgtccatctttctctgtgtctctctctcctcccatctctgtctctgtctctctgtctgtggcttcgcacctgtctctgtccatctttctctgtgtctctctctcctcccatctctgtctctgtctctctgtctgtgtctccgcacctgtgtgtctgtccatctttctctgtctctctctcctcccatctctgtctctgtctctctgtctgtctccgcacctgtctgtccatctttctctgtgtctctctcctcccatctctgtctctgtctctctgtctgtctctgcacctgtgtctgtccatctttctctgtgtctctctcctcccatctctgtctctgtctctctgtctgtgtctccgcacctgtgtgtctgtccatctttctctgtgtctctctcctcccatctctgtctctgtctctctgtctgtgtctccgcacctgtgtctctgtccatctttctctgtgtctctctctctcctcccatctctgtctctgtctctctgtctgtggcttcgcacatgtctctgtccatctttctctgtgtctctctctcctcccatctctgtctctgtctctctgtctgtgtctccgcacctgtgtgtctgtccatctttctctgtgtctctctcctcccatctctgtctctgtctctctgtctgtgtctccgcacctgtctctgtccatctttctctgtgtctctctcctcccatctctgtctctgtctctctgtctgtggctctgcacctttgtctctgtctatctttctctgtctccactttcctcctgtcttctctcatgttgctctgtctttgttttccatgcgcttccaacacttctcccttcgctctcttcattgtgtctcaactcaagtgttacttcttcagagcccttccctgagccctcccctagtctgattcagggtcttcactcccctatttgttttttcatcttatagcatcctacatgctcctttagagaatttggtacaatgtatacacgtattattatgtgtttctttttctttttttttcttttttgtttgtttgtttgtttctttgagatggagtctcactgtgttacccaggctggagtagagtggtgcgatctctgctcactgcaacctccgccccccgggttcaagcgattctcctgcctcagcctccccagtaactgggattataggtgcctgccaccaattctggctaatttttgtatttttagtagagatggggtttcaccatgttggctaggctggtctcaaactcctgacttcaggtgatccgcccaccttggcctcccaaagtgctgggattacaggcgagagccaccgcgcccgtcttgtgtgtttatttttctagtagctgtttctttcattagtgtgggagccccttggggacagggctggtgtctgttatgttcactgataaaaactattcactgcagatgtgttgagtggatggataaagggagatacaaaaatagagagagacagacaggagagggagagatgaaggctgacggagagagaaaataacaacagacaacaatggtagcttactattaattaacctttagaatatgttaaattaattgtaaggaggtcaagaacttaccttatgtctggccctcttctaagtattttaaatgcaataacaaatgtattcctcaaaaaaatctaagaagtagatgctgctatgaactttgtttgacagatggagaaactgaggcacagagagggtaagtagtttaccaaggtcacagaaagactgaggccaaaagagaagaacagacagaagtgggtagatggagagtaggagagagctgggaacacactgagagatgtggccaaaaagataggaagacgctgaaagagagacacgtctcaggaattaggaataatcatcactttaaaaataataaaatatcaggttgggcgcggtggctcacgcctgcaatcccagcactttgggaggctgaggcgggtggatcatctgaggtcaggagttcgagaccagcctggccaacatggcaaaaccccatctctactaaaaatacaaaaattacctgggcgtggtggtgggcccctgtaatcccagcaacttgggaggctgaggcaggagaattacttgaacccgggaggcagaggttgcagtgagtcgagatcgcgccattgcactccagcctaggtaacaagagtgaaactctgtctcagaaaacaaacaagtaataataataatgataaaatatctaacatttatctatcacctctcttctagttgtcatggtaacaattttatacaagttaactagttttaattttcataactccctgaggtactcatcattattcccaatgtgatgaaagaggaaatgaacgcacagagagggcaagctacttattgaagatcacacagcaaagcagccatgcacatgggctgcctgaccccagagcccatatcttgagctgttatgccacctctctctataagtcaggaaacagaagctgaagccaaaggacaggtgggccttcctgtagatacacaggtcatgggggcccaccctggcccactatccatcatctgagtcatctgagttcacccccacctgcggatgagatgcagcctcagccagagaagccagggagtattgctggggaggggagggaatgcggccacagacggggccacccgcccaccgagagagcccgctcttactgtataactggaagaacaagccccttctacctcccatccccctgggggctggctgagccacaagaggcatgaatctctggatgcagtggtgccgctgcactaaggccccgaggcagccccagccatctctgctgaggtgcccagagcagcccttagggaactgacccctgagttttcctcagtaacctcagggaactcctgtcggctggatttgaacaaacctcaagggtggaagaaggcatcactcttgctttttttttttttttttttttttttgagatggagtctcgctctgtcgcccaggctggagtccagtggtgggatctcggttcactgcaacctactcctcccaggttcaagcaattcccctgcctcagcctcccgaatagtggggattacaggcacacaccaccacacccggcccatccttgccttttattcaataacataaggctaccttggggcagattgtattacacaagaaaagtcttttccttccttagtatggacgataggatattcagtaggaagaaaactcaaaagtcctggtgtgagtggctccttttcctgctccggtctcaagaggagagaggctgggactgaatggtgcaatcctgggatctcctccagaagtggggaggaggatggagagacggactttgggagaaggaaagatggagctcactccagcatgagggaggtgcagggaggcagagagaacacagcctgtttgccagcaagatgggaggatggctgtgggctggggggaccactctggggaggatcttctagccactctgcagcagcaagtagaagaaccccagtaaataataaaggagggctgggcacagtggctaacgcctgtaatcccagcactttgggaggctgaggcagatggatcacttgagctcaggggttcgaggccagcctaggcaacatagcaagaccccgtcactactaaaaataaattagccaggcatagtggtgcacacctgtcgtcccagctactcaggaggctgaggcaggaggaggatcgcttgagcccaggagttcaaggctgccgtgagccaagatcacaccactgcactccagcctgtgagagcaaaaacaaacaaggctgggcatggtggctcatgcctgtaatcctagcactttgggaggccaaggcgggtagatcacctgaggtcaggagtttgagaccagcctggccaacatgttgaaaccccgtctttattaaaagtacaaaaaattagccgggcttggtggtgcgtgcctgtaatctcagctacttgggaggctgaggcacgagaatcacttgaacccaggaggtggagattgcagtaagccaagatcacgccactgcactccagcctagcgacagagtgagactgtctcacacacaaactcaccaaaaaaaaaaaaaaatatcaccccaaaaccccacaaaaaccaaaggagcagaagttatgatggtggcctcattaaccaagggcctgggcatcccccatttttctagcagcaaccaagctgagtcatcagacatcactctacagaagaaggaggatggatgggaccccaaagtagctgtgacatttcttgccaggcagatggggacaggggcagtgggcctggagcagactgaaatcaattaagatctaattgtgcaggccatagtgggcaggtgtggtcaagggactagcttttaaattttatttaggttttttttttttttttttagatggagtcttgccctgtcgcccaggttggagtgcggtggtataatctcgactcactgcaacctccacctcctggattcaagtgattctcctgcctcagcctcccgagtagctggaaatacaggcacacgcaaccacacctggctaatttttttgtacttttagtagagacggggtttcgccatgttggccaggctggtctcgaactcctgacctcaagtgatctgcccaccttggcctcccaaagtgctgggattacaggtgtgaaccctcgtgcctggccttatttagttttaattaatttaaatgtaaacacccacacctgattcagttattgggagagttttaattaagtatgtttggaacaacgtgggtgcgtgaatcatctttttcaactctaaactttctgggctctgaatgcagatcaaatatttctgaaaaaacttagcatccaaattgcaatgtgctgggagtgtaagtatatacactggatttcgaagaactggtgtggaataaagaatgtaaattctcttactgatttttttttacattggttacatgtggaaatgacaagtttggatatatcaagtttaatatgttactaagattaattttacctgtttctttttcctttttaaatttatttatttatttatttttgcagaaacagggtctcactagttgcttaggttggtcttgaactcctgggctcaagtgatgtgcctgcctcagcctcccaaaatgttgggattacaggcgtcaggcactgcacctggtccaggtttcttcttaaatgttccctcctgaccacctgtctagaatggctccatctctttaccctgattttattgttatcaagtatgtaagtctgtattcatttcatttcccattgctgccggagtaactaccacacgcttagtggcttaaaacaaaagagatgcattctcttacaattccagaggtcataagtccaaagtgtctaaagtgggctaaagtcaaagtgtcagtagaactgattccttctggaggcttcagaggaggctctgtttcacccttgtttccagctttaagatgtcacctgcctaccttggctggtggccgcatcctccatcttcaaagccaacagtcgcctgcatcatcctgacctccgcttcatgtactcaccctccttctctgactgactcttctgtctccctcttatgggtgatcaaggtgatctttgtgatcacctggagccccctcgggtaatccaggataatctcctcatctccagatcatccacttaatccatctgcaaagtctgttctgccacgtgaggtcacatatgcacggggtctggggattgggacatggacatctttggagagggggtattattctgtgtactcaaaaatcgcggcatattcagtgatttgctcgtttattgtgcctgcctctgctagaccataagctccatgaggaacaaaacatgaccctgtcagggtcaccattgtatccccaatgccagggacgatgcctggcacatagtagttgatcagtaaacattcactgaggactggcctggtgcggtggctcacgcctgtaatcccagcactttgggaggccaaagtgggcagatcatgaggtcaggagatcgagaccagcctggctgacacagtgaaaccccgtctctatcaaaaatacaaaaaattagccaggcttggtggtgggcacctgtagtcccagctactcaggaggctgaggcaggagaatggcgtaaacccgggaggcagagcttgcagtgagccgagatcgtgccactgcactccagcctgggcgacagagcgagactgtctcaacaaaacaaaacaaagcaaaacaaaaccattcactgaggacaaatgttccaaggacagaaaaattcatgctcttatgaacaagtgatttacagtaacagaaaccgttttgaaattggcattgcgttttacactgattaagagacggactctggaatacacacttgtcatagttcaaatctctgctctgccattcactagccgggcaaccttaggcaaatcgtactttctctgtgcctcgattccttatccgtgaaatggggatagttacagtagttgtctcatagaatgttagaaggattaaatgaattagtacatacaaggcagttagaactctgccaggcgcaaaggaagtgcttcataagcgttagctttcattgtcattgttaatattattctgcaaatatctgaaatgatatttaacaaaacatgatgcaaacccaagcataggggattcgtttgtagttccaaatagattaaacatctcagcaacactttggaagattcttattgtctccaccttgagctcaccatgaactcaaggagcgagagaatacagtccgtacaagttgtgaatcctgaaaatctgagacaggtctcagatttttcagaaagtttattttgccaaggttgatgacgtgtgcccgtgacacagcctcaggaggtcctgacgatgtgtgcccaaggtcagcagagcacagtttggtttcgtacattttaggaaggcatgagacatcaatcaacatatataaaatgaacattggtttggtctggaaaggtgggacaactcgagcggggagggggcttccgggtcaaaggtagataagagacaaacggttgcattcttctgagtttctgattagcctctccaaagaaggcaatcagctgtgcatttatttatttattattattattattattattattattattattatttgagatggagtcttgctctgttgcccagcctggattgcagtggcgtgatcttggctcactgcaacctccacctcccaggttcaagtgattctcctgcctcagcctcccgagtagctgggactacaggtgcccgccactaagcctagctaatttttttgtatttttaatagagacagggtttcaccatgtcagccaggatggtctcaatctcctgatcttgtgatctgcccgcctcagcctcccgaagtgctgggattacaggcgtgagccaccgcaccccggccagatatgcatttatctcagtgagtagagggtgggtttgaatagaatgggagtctggtgggctctaagcagtgcccagctggacttttccctttagcttagtaattttgggggccccaagatttatttttctttcacgaactcatttcaaaactgagtctggatttcattctcctagcttgacaaattcagctgccaaattgctgattaaaagcagatttccttcttaaaggggaaagccatggtttttttctgaaaggagaggagaaagccttatcgtttctgtttcataaaaggaaactttcatgaactgcttcctggctcctctggttatggagtgaaattcattgcaatttcttaggatctctacccgggccacccacagagggctcttgaacaacatgcaggctgcagacacatctggcctgtctcgtagagtctggacttttttgtttgcttgtttgtttgtttgaatggatcacgagcattaaaaggtcaagagattgcaagtttctcttgaaaaggccacggtatcagtcaatatcacgcctgcattcccacgtggccataatccagcatcagcaggtgctgagtggccaccccgggggcaccctgtggttttccttggcccacacacagtcagcttccctcatttatacttcctgcctggccccaggaggtggctgagtttgtgacctcggtggagaaaaaagcatggacacacagagacatggatataaagagatcagagggaaagaaagtcacaaataacgaaacaacaccacaaaaggagtcatccatcaccctgaccatgaacatcatcatcatagctactcttgtaacgtactttatcttgtgccaggcattattctaggctctttgtaaatgtgaactcatttaatctccatgaggtgggaactattatcaccctcactttatagatttaaacaaagagtcacagagaagctcccgggttgtttgcagaaaacagcgggcaggtgagagcgctgggctgggcactccccaagctcggagcaagtgcgcctacaactgtgcaatactgccacctagtggagccggagagacatactcggggaggactaaaggttgtgggcccagggttctcttgcgccagtcaccctgggccgcagcatccggctcaggatccagaaacgggagcagaggtggcaggaagcagggctggccgccaccagagctttccacctggggacaccaagtcatggtcctgactttgggtctctcagatgtaaagggaggggttcaagcgtgacatcaggcgagggctgagtgtctggcctcatggtcggctttcctcagctgaggatagcgacatcgcatgggtttatgtgaagtttcaatggggacgtccacacaacacgttggacacacaagagcccggcaaatggtatctccaattattgctatgaatacaatgaagtcacatggtgaccttggttgcccttcgccatctcccgctccgctgtgcacccatatagtcaaataacaaccatgcagataataataataattaacttctcacataattgagtggctatagtcattttttaaaaatagagacagggtctcactacgttgcccaggctggtcttcaactccaggcctcaaaccgtcctcccacctcggcctcccaagtgctgggattacaggtgagtcactgcacccagcagattctttaacttgagttgttgtacttaatattataggataaaatcataagcctgtcttaaaaaaaaaatggtgcagggccgggcatggtggctcatacctgtaatcccagcactttgggaggcagaggtgggcggatcacctgaggttgggagtttgagaccagcctgaccaacatggagaaaccctgtctctactaaaaatacaaaattatccaggcgtcgtgctgcatgcctgtaatcccagctactccggaggctgaggcaggagaattgcttgaacccgggaggcagaggttgcggtgagctgagatggtgccactgcactccagcctgggcaacaagagtaaaactccatctcaaaaaaaaaaaaaaaaaaaaaaagtgcagatccccagcgctctcacctgccactctgttgtctgcaaacaatcaatttctgaattgatttctttccccatttgaaaaggaaatcagcttttctccgcaaaattctcactggctagatttgttagattggggaaaggtgagaagaaagcaaatctttgtttggttccacacttactgaagtgggagaacactgccgctaattggtaacacatgctaagtgtgtgtgctgtaccatagtcttaagggatttgcaggaatgaacttgtttatattcccagccaccctaggaagttgctactgtttctatcgccactataaataggaagaaactgaggcaaagggagattaaagttattttctaagtcaaggtgccatggttcacacctttaatcccacctttaatcctgggaggcgaggagggaggattgctttagtccaggagttcgaggccagcctgggcaatatagtgagaccctttctctattaaaaaaattttttaagtcattttccaaggtcacacagtaaggagcagccaggtttggacacagggactctggcacaagtgtgtgtgtgtaacatcatttctatttaattttttgaatagaaaatattttcggccaggcactatggctcatgcctgtaatcccagcattttgggaggccaaggtgggtggatcacttgaggccaggagttcaaaaccagcctggccaacatggcgaaaccctgtctctactaaaaatgcaaaagttagctagacatagtgatgcgtgcctgtaatcccagctacttgggaggctgaggcaggagaatcgcttgaacctacgaggcggaggttgcagtgagctgagatcgcgccactggactccagcctgggtgacaaagtgagactccatctcagaaaaaaaaaaaaaaagaagaaaatatttttacatggtaaaaaaatatgtttataaaaaatacagagtgataaacctccacctaactttgttccccaacctgtcctgtcttcatccctcttcaaaacacaaaaactagaatatgtttttttggatcatcttccaggattttgtggcacagggacagatgcatacaaagatgtgtttttatttttttttctcttgcctttagccaccaggctgggtttcgcaccaagaaacgtgtctcccggagcttagaccacttggtgaattctctttcttgttatcagaattgaagacctgtaatgcctggttagtgtcaaggtttgtgaaacactgtttggataattacacaagttataaaacaatagctggtgtgaaaattacagatgattcataattacacatatggctgtcaagctttctgctagagagtctttcagcctgcgagaactcagtgggaggaacttttttttttttcctaaagggatctcattgctcattctgcaatgattagagctggccagaaaatagacactggcaatacagcaaataaagtcgaagggaaaatgcaatcagagagatctaggaggacgacaatattttttactgagcacttccgatatgccagacacatttttattatgacattttattttgaaacagttcaaaactcacaaaaattgcaaactagtgcaataatgcccatgtacccttcatccagattctcccaatggtaacattttttataaggatagtacactgtcaaaactaggaaaacatcgttgataccatgctgttaactcacatagagaccttatttggatttcatcattttttacatctctctctctgtctctctctccaccccatccccaccatctgtttgtctctgtttctctctgtctctcttttcatgtatctagttcttatagctctatagataaaggtaaccatcaccacagttgggatacagaactacttcatcaccataaagaaattttcaggctgggcgtggtggctcatgcctgtaatcccagcactttgggaggccgaggtgggcagatcatctgaggtcaggagttcgagaccagcctggccaacatggtgaaaccccgtctctactaaaaatacaaaaattagccgggcgtggtggcgcacacctgtcatcccagctactcaggaggctgaggcaggagaatcgcttgaacccgggaggtggagtttgcagtgagccgagatcatgccactgtactccagcctgggcaacagagcaaggctccatctcaaaaaataaaataaaataaaataaaaaataaaataaaataagggaaatatttttaaattgcaattttaaagatattttaagttctgtggactatatggtttctgttatcaaccagtcaactctgcttcatcgaacaactcatactcaatacatacatgaataagcatggctgtgttccaataaaactttatctacaaaagcaaaacaaaacaaaacaaaagaccacctttgagttggtcacaaactttgtgaaacatcattgagtcagttgcgtaagttatacaacagtgactaagtgtgagaactagtgatgactcccttcattgttatcagtggagatagatgatgcagacctggcttatttcttaaggtgcactgtttcaaaaagctacaaaaactcaggacaagctcctaattgtgaagatgaacaatttcactcatcttggtctactgccttgcaggggtgttttggtagagtggtttctcgacagtttttcttgaaacccaaatccaaatccaaagctttgctgagtaatccattatccttgaaacaaccccgtgaagttgtactattattcttgcatttgtactattattcttgtattttggctcggaagactgtgtgcctagctgctctgctatcctgtctctgtccagcacacacatacacacacacgcacgcgcgcacgcacacaaatgtcaacattggtttcctctggttggtgagatcatggggtgttttttcatttttgttttttgagacagagtcttgctccttcgctcaggctggagtgcagttttgtgatctcggctcactgcaaccttcacctccggggttcaagtgattgttctgcctcagcctccccagtagctggaattacagtctcccaccaccatacctggctaatttttgcatttttgttagagacagggtttcaccatgttggccaggctggtctcgaactcctggcctcaagtgatctgcccaccttggcctcccaaagtgctgggattacaggcgtgagccactgcacctggcccaggctggggtttttattatcagaaactgctagactttttcccgaagcggttgaaccatttgacactcccttcaaccaggtatgagagttcgaggtgccccacgaagtgtgcaacatcttggcgttttcatcttatttatttttattgaatttattgtagttttttgttatttagtttttatttcataatcataaacttaactctgcaatccagctaggcatggaagggaacaaggaaaacatggaacccaaagggaactgcagtgagagcacaaagattctaggatactgcaagcaagtggggtgaaggggttctctcccaagctacagaaggaatggtctggtcgttaagataaaatacaagtcaaacttagagttgttcacagtcagcaatggtgatctccttgctggtcttgccattcctgggcccaaagtactccatggcctccacaatcttcatgccttctttcaccgtgccaaagaccacgtgcttgccatccaacccctcagtcttggcagtgcagatgaaacactgggaacaatttgtattgggtccagcatttgccatggacaagatgccaggccctgtatgctttaggatgaagttctcatcatcaaatttctccctgtagagggacttgccaccggtgtctttatggcgtgtgaagtcaccaccctgacacataaaccctggaataattctgtgaaagcaggaacccttataaccaaatcctttctctccagtgctcagagcatgaaccttttctgctgactttggaaacttatctgcaaacagctcgaaggacacgtggcctaagggctctccatcaacggcgatgtcaaagaacacggtggggttgaccgtggctgatagtacaggactcgcagcggcagtgtctgcaaagcctattttaattttttaaaaccgatctgatgggtgggtggtagcgtctaattgtggcttgaattggatttcctctcatgacgaaagaagttgagcattgtttcgtgtgctttatggccctttgtatgtctgctgttgtcaagtggacctgtgtacaccgagagctgacccactcgtgtatcagttctgtggggctgctgtaacgaactagcacaaactgggtggctttaaacaaaagaaatgtattctctcagagctctggagactgtaagtctgaaatcaaggtccccatggtgtcggcaaggccacacgccctcaggctctgcgtagagtctttcctggcttctgttgacggctgctgaccactggccttccctggctggcagctgcaatactccaatctctgcctctctcttcacatggccctctccctttgtgtctgtcttcatattttcttccctgtttttataaggacaccagtcatactggattaagagtccaccatactctagtaagacttcaactacttatacctgaaatgactgtatttcaaactaagatcacattctgaggtcctggcgattagaacctcaacatatcggctgggcgcggtggctcacgtctgtaatcccagcactttgggaggccgagacaggtggatcacctgaggtcaggagttcaagaccagtctggccaacatggtgaaaccccatgtctactaaaaaaaaaatacaaaaactagccaggcgtggtggtggatgcctgtaatcccacctacttgggaggctgaggcaggagaattgcttgaacgtgggaggcggaggttgcagtgagccaagattgcaccatccactctagcctgggtgacaagagcaaaactccatctcaaaaaaaaaaaaaaacaaaaaaaacaaaacaaaacaaaacaaaaaaacttcaacatatctttttgtgggggaacacttcaacctataacattatggattcagtagcctgccctttaaataatgtccaggctctaggctacatctcagatgcgtcagtgatgcattccaaaagtggtagtgttaccatgcaaccagtgggctcacagccccatgtgcatagaggccaataccatagcaccggcttttgagaaaagaaaaacttaattgcacgttgatcagcaaaaggacataggaggaaatacctgactctgtctccctgagctgggggctggagcaggttttataagcatggagtaaggaggcgtgatctgattggatctggcaataaggtgatgctggagaagcatgatctgactggatcctgccatggggtgacaccaaggctcaaatctgatcggatcctggatcctgccatgcagtgtcagcttcttaattcagtccctgctcctccatccaagcactttggttccccctgtggttgcacgcatggttcatctgggtgtactcaggttatatgacctgaaataccatggcaactgaaaaacatctcacaactttgttacataaaagtggaaccaggctgggcacagtggctcacacctgtaatcccagcattttgggaggccgaggcagttggatcacctgaggtccggatcacctgaggtcaggagtttgagattagcctggccaacacggtgaaaccccgtctctgccaaaaatacaaaaaaacatcgctgggcatggtagcacgcacctgtaatcccagttactcaggaggctgaggcagaagaattgcttgaacccgggaggtggaggtggcagtgagccgagatcgtgccactgcactccagcctgggcgacaaaagtgagactctgtctgaaaaaaaaaaaaaaaaaaaaagtgaaaccagattggtctgtgccaactctggggcaggcactgtgcatgaggtggaattgtcatcttggtgttacaggtgaagagtgtgacctatacaccatggctcagagaggtcaaggaacttgcccaaaactagacagctgggaatggctcgcaggattgtaggactccaaatttctttttctttcttttcttcttttttgagacggagtctcgctctgtcacccaggctggagtgcagcagcacgatcctggctcactgcaacctccgtctgccaggttcaagcgattctcctgcctcagcctcacaagtaactgggattacaggcgcccgccaccacgcccggctaattttttgtgtttttaatagagacggcgttttgccatgttggccaggctggtcttgaactcctgacctcaagtgatccaccggcctcggcctcccaaactgctgggattaccggcgtgagccaccgcgcccggccctggattccaaatttcatgcccctcccacaactttcccaggtcccagttcagttcttgcaaaggcctccaggtggcgcgatagagcaaatggtggattccgctaacttgggtttacaatttcttcctgggaggcttgcagggtggggcacttacttgaacgtgcacacgaaacaccaggggatcttatggaaatgccgcttctggttcagttggtctggagtgggactgtgttttttaatatgcttccagggcatgtcgcttcagctttgagcagcaagagcttcattcagtgggataaacagccctcgccacacctgtgcaggcagccaactccagaacagtaactaatgacgttcatgacaatcacagaaacaacgatttccacatgtttattctgtgccggcctctgtgttcttgtctttgcctttatgcgcattctctcctttaatgctcaaggcagtctcatgaagtagcatcattttacagaataggaaacaggtaggattgaaccagtctgtgtctattgcaccccttccctttttcctacaggatagatgccatccctgggggactcagcccaaggcatgggggaagagaggcccgggctctgggggattggctgcaaggccaagcggtgggacgaggccgcttaggcagcgggattgtggggattaggaggaagagtgagatcaataatatgcaaagggccgggcacggtggctcacgcctgtaatcccagcactttgggaggccgaggtgggcagattgcttgaggtcaggagttcgagaccagcctggccaacatggtgaaaccccgtctctactaaaatacaaaaaaattagccgggtgtggtggtgagcacctgtaatcccagctactggggttgggggtgttgctgaggcaggagaatcacttgaactcgggaggcacaggttgcagtgagctgggatcgtgccgctgccctccagcctgggcaacagagccagactcctctcaaataataataataataataataataataataataataataataatataataaaatagaaagatctgcaaagtaaccccagatcctgcactacctcccttacaactctcaccaaaggaatcctttctctctctctctctttctctctctctccctttcatttctccctctctgtttgcccttctctttccagatctctctctgggtctctttctcttcatctctcctcctccctccctcctttccttcctcaatcctcttgctctccctatgtccttcttccatcactttctctatgatcagtgtttcagtctcttctctctctctgtttctctctctctctttgaatgtcaccaaagctagctcttcccctctttctgaatctttctctaccctccccacccccagtctctttaaacttgagtctttctgttgaggtggtatgagcctacagtcccagctactccagaggctggggtgggaggatcccttgagcccaggagtttgagtccagcctgggcaacatagcaagattctgtctccaaaaaaaaaaaaaaaaatctgagtctgtttgtctcactctccccaagtttctctctttaagtctctctgagtccatctgccttaaatctattccagtatatctctctgttcctctctttcttccttttcctcccttcctctctccctccttcctctcccctccaaatctgtctctctccatctctctctgtctttacatctgtttgagtctctttcttttcttttctttcttcttttttcttttcttttttttttttgagatggagtctcgctctgttgcctaggctggagtgcaatggtgcaatctcagctcactgcaacctctgcctcctggattcaagtgattctctggcctcagccttctgagcagctgggattacaggcacccacctacatgcttggctaatttttgtatttttagtagagacagggtttcaccatgttggccaggctggtcttgaactcctgacctcaggtgatcagcccgcctcggcctcccaaagtgctaggattacaggtgtgtgagtcaccgcacctggccaagtctttctttctttaaagttctcagagtctccctacttcccccattcctaccccttcacctcacatccttatggctttggccctatgtacctatgtttgctttcgctggctcaatctagtgttgtggttaccggcacgggcttaggactcctacgcccttgactcaaattccggctctgccaagtaccggctgcagaaattgagccaaatgcaccaaacctccctgctcctcagcctcctggctggctgagggcctccctcctaaggtttctgtcaggaccaggaggaataagcatgcaatgaatgcagtgaggtgtctggcactggatgaatggtagatgttgtcatcatcatcattattattattactaataaaaggtaacccacagccagcctctctgtagccaacaattagatgcttatctggtgtgtggaatgcagggggggagggccctcccaccaataaaattggggccactccctgacctcggtttctcgccaggatcaaccaccccaagagcgaggaccgggtggaggatgtgccagctttctgagccacacctgctgacacttttcgccctcagtcaaagcctatctgagatcttcagccaattctgtgcatttcatttttttttcttttataaaaagtggtttatctatttccctttttattttagagacaggtcttactatgttgcccgggttggtcttgaactcctgggctcaaacgatcctgctgccttggcttcccaaaatgctgggattacaggtgtgagccacaattttgtacatttcagagaggtatgtattcaagtgagaatcagccaccgctgggttacattaagtgtctggtttagcaagtcagggatataaaacagcatcagaaggtggccacagtgagcaggaaccacaacacacaaacacacacacacactagtctcacgggtggctcagccccaggtcaacatccattcaagctatggcttgacaatttgacaagctactttttactccatttatagcttaggtgaagaggttgaatattaaatgcattattatcatcactggttcaaacagattcctttcttcattttcttttcttttcttttcttttttcttttttttttttttttaagatggagttttgctcttcgtgcccatgctggagtacaatggtgcgatcttggctcaccgcaacctctgcctcatggattcaagcgattctcctacctcagcctcccaagtagctgagattacaggcatgcgccaccatgcctggctaattttttgtatttttagtagaggtggggtttctccatattgatcaggctggtctcgaactcctgacctcaggtgatctgcccacctcagcctcccaaagtgctggaattacaggcatgagccaccatgcccggcccctttcttcattttctctctctctttctgtgccttcttttcctccctcccactctccctcagtcctacaaaatgtgcagtgtggttcttatgtatgagtgaatgtgtgactttaatttacttaactggcattaggtgatattcttactctatcctaagccactttgcaaatagcactatgtttttaaggcccacccgtgttgttacgtgttcatacatgtgttcgttgcatctgacttctgcataggaacttcatggcgggacgtccaccacatttacacaattcccctactgatgggcacttggtggcttccagtttctggccactgcaaagaacactgcaaagcacaagcttgtacgtgtccccttgtgggtgtgtaagaatttctttgggatgtgtagccaggagagaaatcgctgagtcattgggtgtgtgtatacttgtttgatgaaatagcatcagctccgtcttcataattggagacaccacactcaacccagttgcacttgaacattcgaatgtctacacatccctgacagcccttgaccttgtctgcccttctcaaaatgagaagactacttgatgtaaagtcacatctcaagttacagtatctaaaaagtttgaacatctctctctctttttagagaccaggtgtcagtctgcgatcacagctcatggcagcctcccaggctcaagtgatcctcccacctcagcctcaagagtagctgggaccacaggctgacaccaccatgcctggctaattttattttattttttattttttatttttttttgagacggagtctcgctctgttgcccaggctggattgcagtggcgtgatctcggctcactgcaagctccgcctcccgtgttcacgccattctcctgcctcagcctcccgagtagctgggactacaggcgcccgccaccacgcctgcatgcctggctcatttttaatatttttttatagaggccgtgtttcgccatgttgcccagggtgttcttgaactcctgagctcaagtgatccgcctgcctcggcctcccgaagtgccgggattacaggcacgagccaccgcgcctggccttgaacatctctatgtgcatgttagcttttggaattctgcttctgcaaatcacctctttgtagcttttatccatttacctataaggatatccatattttttctcattaattcacaggtgcttcttgcatattacaggttctagttctttgtccattttggatgttacaaataacttctcccattctgataaatgcctatgaatcgtccttaccttctcttaaaccaaagtgtttaattttaaaataatcaaactaatcaatgttttgtcatatgatgtgtgttttttttaggtcttaagaagtcatcccctatcacagagattcaaaaataggccgggtgttgtggctcatgcctgtattcccagcacagggatgccaaggcaggaggatcacttaaggtcagtagtttgagaccagcctggccaacatggcaaaacccccatctctacccaaaaatagaaaaagcagctggacgtagtggcatgtgcctgtagttacagctacttgggaggctgaggcatgagaatcgcttgagccggggaggcagaggttgtagtgagcccagatcatgccactgcactccagcttggacgatagagtcttcaaaaaaataaaaaaataaataaaataaatatatattcaccatgattttttctattaattttataatattatctttcagtggtctttaatacagctggaatccaatttcatgtgtagtattagaaatctaggtttctttttctctgcacagcagacgagtttttctaatgccacttactaaatataccatcattctcccactaatttgtgttgatattttatcttatattaagtccctaatatattatatgatgatacatcagtttcctatgattctctttctgggacctctctcctgcctctctggtctacttgtctgttcttgcactgatcccacccttttttaaaaacactgattttgttttgtagcatgtcttaatatcgagtagggcgaggagcttatttcttgcaccgccacagccgcatttttctcaccacttacatcaccatgcaggaaatacactgatctcctccacccttaatgggaacaatttacagacatctgtcccctcctggttctggatccagcctccatgttaaaaagacatcttcatccaggaaaagaaagtcaaggctgcccaggaaaatctgcacaatgtcttagctcatctttcagtttccagaagcttcatttcccataccatcctctctatatcggcatatagaaaaccaactacggtagcccggacacccaagattgtattctgcctgttccaagcccagatgtaggaagtccatgcatggagctccgaaggaaatcatcagaaatgtgagctgctttctgtaatcccatctttatcctgcggcttttattctcatcatgcaaggtggctggtccgtctccaggcacccatattccaggtgagaagaggtggaagggaaggtccaaaggtccaaacattactctctctctcctatttatttatttatttatattttttatttttttaagacagagtcctgctctgtcgcccaggctggaatgcagtggtgcgatctcggctcactgcaacttccaccttccgggttcaagcaattctcctgcctcagcctcctgagtagctgggattacaggtgcccaccactgtgcccagctaatttttgtgtttttagtagagatggggtttcatcatgttggccaggctggtctcgaactcctgaccccgtgatccacctgcctcggcctcccaaagtgctgggattataggtgtgagccaccacacccagcctactctttctcttttatcagcaaaacaaaaactttcccagaaactccagctttgtcttcttgcttataactggatgacatggccacccggatgtatccaggtcatatgccaatctgagcaatactcgggctcgtcagtaatgcagtgggaagaatgataagcacatctcagttgcacccagcttgccctgtgccaagtcagacaagtcacaaaacaccaacctctgcctcttagtccacacacatctcccctctgttcgcctgtttgcccttgagcctgaacttgatgggaaaatgcatccaggctctgccattagcaacaatcagcgtggggatagtgcttgcatctttggtgggcagagaaccaagcacactgtttctcctaaactcttggtttatttttcttgagacagggtctggctttgttgcccaggctggtctcgaactcctgggctcaagcaatcctcctgcctcagcctctgaagtagttgggattacaggtgtgagccaccatgcccggcctctcttcttttcatcacggttgtagcaattgttccacaagtgtattacctttacaactgttaaagaaactagaaactatccaaatgtctcctcatagtaaaaaaatggctcaataaatcggagtacatttacacaatggtatactgtgcaacgatgagaataaaacatttacaaccataaacaaaaacctgggcggaccacacaatatataatactgagaaaaaaaaaagcccaacacaaaataatataagacactcattgctttttttgtttgtttgtttttttgtttttttagacaaagtctcactctgtcaccaggctggagagcagtggcacgatctcagctcactgcaacctctgcctcccaggttcaagcaattctcctgcctcagcctcccaagtagctgggattacaggtgcatgcctccatgtccggctaatttttgtatttttagtagagacggggtttcaccatgctggccaggatggtctcgatctcttgacctcgtgatccactcggctcagcctcccaaatgatttatttatataaacttattatacttctatatgtctatgtaaataaatttatatttatatgttgttcataaatgggacaaattaatttatggtgatagaagtcacaaaagttgctacacttggggagaagtcatgaaagtcgctacccttgcaggcgagggatttaggtagtaatggaagcggctacatttggcaggggaggtagtgactgcaaggaagaccccactggtttttctgaggagatgcttaggttccgtggctctgtctgaatgctggttacaagggtgtgttctgttttgtgaaacttcactgccatttatgatacttctgtgcatgtttctttctttctcctttctttctttctttctttctttctttctttctttctttctttctttctttctttctttttttgtttcttgagacagtctcattctgtcatctaggctggagtgcaatggcgtgatcttggctcactgcaatctccacctcccaggttcaagcgattctcttgcctcagcctcccgagtagctgggattacaggtgcccaccaccgagcccggctaatttttgtatttttagtagagacagggtttcgccacattggccatgctggtttcgaactcctgacctcaggtaatccacccgcctcggcctcccaaagtgctgggattacaggtgtgagccaccatgcccggccctgtgcattatctttcaataaaagttaatttaaaatattgctgcaagggcatctatggggcagacatcattggttgttcctcccgttctttgatgtcggaatcctgatttctctcaaggagcagcttctacatgctttaggggaggtcctccactccatcgtgaaagaataatcctgtttggttcaaatcaaccatgttaacctctccaccccactccccaccccaccccaccagtctgtgactggtttaggaaaggacatgtgacccaattctggccagtaagaataagataaaattctgctggggtggtttctggaaaagcatcatccttctcaaagacagacccactacgggtgttgatcttaaggatgatgaccccccgccgaggagaaccaagcgaaacacagcctgacgccctgtgtctggagctgcccttacctggatttcttgatatgtgaaattaaaacttatttactattgaagccagcatgaatcttctcttgttcctcaaagcagcttaaccggaaacatcattttggaaaatgtgctcaagactgccccttagctaggattctgctcctatctagatttttttaagattaagaaaaaaaaaattgaggccagatggctcacgcctgtaatcccagcactttgggaggctgaggtaggcagatcacctgaggtcaggagttcgagaccagtgtggccaacatagcgaaaccctgtctctactaaaaatacaaaaattagccaggcatggtggctcacacctatagtcccagctactcaggaggctgaggcatggggattgcttgaactggggaggtggaagttgcagtgagccgagaatacgctactgcactccagcctgggtgacagagtgagactctgtctaaagaaaaacaaaaacaaaaaacaaacattgaattacaactgtcacccagtactatttgcccctattttcacaccacaccacacaccctggcagcccagtctttctggaatgtcccctaaaaagtcgtgaggacttgtaaatggctaggcacaaaggggaagataaaggtgacaattattggatcattttgatgtatgtgtccttctctcacacctttgactgttcatcaggcagacacttcttatctcttcttccttgctggtaaggactgcacccgtgacagagaaatgtcagaaactcactttctcagcttctcttgaagctagagtgtcagcattgggaccttctccaatgagtggtcattgagacccaagaacagatccaggggtgtggggggactctggaaaagactttctttcctaatgaagagagctctgccaacagagtctctccttcctgccttttgtcatggtgcgtgaggatgtgatgtctggagctgtggcagccattttacagccacgagattacaagcctaaaggagaaagctgacatattttcttcttcctgctagaacataagcttaaggaaggcaggggtttggtgtctgttttattaatcagtctatcccaagtgtctataatattacttggctctcataggtgctcatgagttgaataaatatatgaatgaatgaatgcagagggcagtagagaagaaagatgggtccctaatgatgtaatgtaggaatcaccaaaccacagtacttccctcttttggggcttcttattatgtgaaataatacacgtccttattgcttaacccactttgagttgggtattttgttactgacaaaattttctagtgtaattccttttctagagtgttcaatttccaaagtattccctggagtgactttctataaccacctgtgagtatcttgagaaatcttagagctggattggcacgtggagatcattacgtttcaatcctcccattttacaggtagagaaactgaggtccagaaaaagtacaaatgacctttacacaggtcactcagaaagtgctgaagactagaatgtccatgtgttgatgtgttgtccatttcaatgactaccacgcccacaaccttcttaggggccctgccctgcccactgctatggatgaaggggtggctgggggatccatgttgcactctgtgggcccacctttcagactagagatagagtctgcatctgaccctaggacagccaaccagattttttctctaggggctatgaacaaagaaaacccagtaactggagccagttatgggggagagaagagatgctttgataggcaacaggcagtcaatgtaatgagaaaacagaggtgggatgagaagaaagagaccgtgaaagacacatacctaggggagaagggatagagatcccacaggcagctgcttctgccctgacattttccaatttaaattaatggatattcttttgataactgatatggcctggccctgtgtccccacccaaatctcatcttggattttaatttgaatcataatccccacgtgttgggggtgggatctcatgggaggtgattagatcatggggacagtccccccatgctattcttgtgatagtagtgagttctcacaagatctgatggttttataattttcccccttcagtttgcccttctcctttcggccaccctgtgaagaaggacatgtttggttccccttctaccatgatcgtaagttttctgaggcctccccagccatgctgaactatgagtcaatcaaacctctttcctttataaattacccagtcttaggtagtatctttgcagcaacttgagaatggactaatacaataacctacctcccgtttctaccctggccaacaagcagctccagtttgttctccacaaagagccagaatgttctcctttgtgcatgaaccagatccggctggaaaacctccaatgacttcccaaattctcagagaaaacaaacaagtgtccagctctatgggtcttctttcagctcctggagaatgtccagcatgctccaatctcagcacttggcacttgacctcctctctgtctggaacatcagtgccccagatgttcatggggctggccactttctttctttttttttttttttttgagatggagtctccttccatcacccaggctgaagtgcagtggcgcaatctcggctcactgcaacttctgcctcccaggttccagtgattctcctgcctcagcctcccaagtagctgggattacaggtgtgcaacaccacgcccagctagtttttgtatttttagtagagacagggtttcaccatgttggccaggctggtcttgaactcctgacctcaagtaaccacctacctcagcctcccaaagtgctggggttataggcatgagccactgcgccctgcctggggctggccactctatcctctcagtctcaaatggtacctcctcggcgaggccctttgtgtttgttacagtggctactgtaacaaatcactgagagtctagttgcttaaaacaacacagatttattctattgtagtttgggaggtcagaagtcctaaagatctcactgggcagaaatcaaggtggtcggcagggctggttccttctggaggctctaggggagggtccattcccatgtcctcctgccttccagaggttgcccatattccttggctcatgccccttccttcaccttcatcatcatcatcattattattattattattattattattattactattgttagagattgggtcttgttctgttgctcaggctggagtgcagtgatcctcctacttcagtctcccgagtagctgggactgtaggcacacaccactacacctggcaaattaaaaaacattttttttttttttagagatggggtctccctatgttgcccaggctggtcttgaactcttggcctcaagccatgcccctgccttggcctcccaaagtgctgggattacaggcgtgagccaccatgctcatcttcctctgtcttcaaagccagcagcatagcatcttccagtctctcattctgatctttccgcctccctcttataaggacccttctgattatattgggtccacccagataatccaggatcatctccccatctcaagacccttaatcacatcagcaaagcccccttgctatagaaggtaacatattcacaggctccagaaattaagatggcgtttcgaggtgggagggaggcattatgctgcctcccatgccctccttgatcatccaatgtagagaccccccccaccaactcacgacatttcctctcttgccttatgccctgctctcattgtgttcatgtcacttacataattactatggcacatacaagtttatctctctctctcttttgtttttttgagctggcatcttactgtcgccaggctggagtgcagtggcgtgatctctgctcactgtaatctccacctcccaggttcaagcaattctcctgcctcagtctcctgagtagctgggattacaggtgcatgccaccatgcctagctaatttttgtatttttagtagagagggggtttcaccatgttggccaggatggtctcgatctcctgaacttgtgattcgcctgctttggcctcccaattatctctctctttattgtctgtcttccactcctggaatgtgagctctacaaggcaggaactttttggtctgtttggcccaatgccttatccccagcacatggaaccattcctggtgcaaagtagccacatgggcccgggtgtggtggctcatgcctgtaatcccagcactttgggaggctgaggcgggcagatcacttgaggtcaggagttcgagaccagcctggccaacatggtgaaaccctgtttctactaaaaatacaaaaactagctgggcgtggtggtggacgcctgtaatcccagatgcttgggaggctgaggcaggagaatcgcttgaacctgggaggtggaggttgcagtgagccgagattgtgccactgcactccagtgtggttaacagagtgagactccatcgcaaaaaaaaaaaaataataataataaataaatgaaaataaaaaatagccacctggccaatatttatgaagaaggtgaaaagtagtctgactggacctctgtttctcacaacccaagtgacctcatagacaaaacacatgagcctggaggcggagatatgacttgttcacagccaccctgcacagggaggagacacaggaagattccacttctcagtttatttctgggactaaatttgggtcagagctgcagagaagggatgggccctgagcttgaggatgaaagtgccccagggagattgagacgcaacccccgccctggacagttttggaaattgttcccagggttcaactagagagacacggtcagcccaatgtgggggaagcagaccctgagtccaggagacatggggtcaggggctggagagatgaacattctcaacatctctgggaaggaatgagggtctgaaaggagtgtcagggctgtccctgcagcaggtggggatgccggtgtgctgagtcctgggatgactcaggagttggcctggatggtttcctggatccacttggtgaacttgcagaggttcgtgtagacacccggtctgttgggccgggcacaagggtaatctccccaggacacgagtccctgcagggagccattgcagaccacaggccccccagaatcaccctgcaggagagaaaggggggcatgagagaggcagagatgtggcaaagtgggcagaaggagacatgagagacccagagatgcccatagatggagaagcagatgggaacagacacacagagatggaaagtacagagatgaagaaatgcagaaaaagacagagatggagacacaggcaaaaggagagagagggagaatgttattaatatttcactccaaatccagcttttttttttttgagatggagtcttactctgttgcccaggttggagcgcagtggcctgacctcagctcactgcagcctccatctcccgggttcaagcaattctcctgcctcagcctcccaagtagctgtgactacaggtgtccatcaccacacccggctaattttttgtattttttttgtagagacggggtttcaccatgttggccaggctggtctcgaactcctggcctcaagtgattcgcccacctcagcctccaaagtgttgggattacaggcgtgagccaccatgcctggcctccaagttcaacctttagaccccatttgtcactctccactccatcttcctcttccagattcctgttgtccacacatcatttcgggggggtctgtgacccttcctctccacatctcgaatcttcgtctctactttctgttccagcctgtctccctcatcgtgtatctctccgcctccctttctctctcactctcccctccagcctgtgcaggccttatttctcttactggacacacaccttccttccccattctccaccaacccatccttatacctcccttctgcaaaaatacggttctcagcccctggatgagggttcctcgatctgggcactgtgggcatctgaagctggataatggtttgttgtggaggcctgccgtgtgcatcatagcatgttgaacagcacacttggcatctatccattagttgccagtaatgcccctccatatagttgtgacaaccaaaaatgtctcctggtattgccagtgtcttctaggggcagaatcactcccaatagaaatccattcgcttggactaatttgtgtttcctgtcttcaattccccatacctccctataattaccctcctataataatactcactgctcttcaacagtcatttttttccctcttttccttctttccttccttcctctctcttttctttcttctttctttctttctttttctttctttctctttcttcctttctttctccttccttccttcctttctttctccttccttcctttctttctccttccttccttcctttctctctccttcctcccttcgtctcttttttttttctttctgacaaaaacgtcttgctttgtcacccaggctgctgtctggagtgcagcagtgcagtcatggcttaccgcagcctcaaacgtttgggctcaagcaattctcccacctcagcctcccaagtagctggaactacaggtgcaagccaccacacccggctaattttttttttttttaatttactacatatttatctatctctttattgcctgtcttccacttggggaacatgaggtccacgcggcaggaagtttttggtctgttttgcctgatgccatatccacagcacctggaaccattcctggtgcaaaatagccactcggctaatatttatgaagaaaatgaaaagtagcttgagtggacctctgtttgaggtagagagaaatgtctatctcccacctgggcacggtggctcacacctgtaataccagcaatttgggaggccgaggcaggcagatcactggaggtcaggagttcaagaccagcctggccaacatggtggaaccccatctctacggaaaaaaaaaaatagccaggcatggtggtgggtgcctgttatcccagctacttgggaggctgaggtggaagaaatgcttgaacccaggaggcgcatgctgcagtgagctgatatggtgccattgcactccagcctgggtgacagagcgagactccgtctcaaaaaagaaaagaaaagaaaagaaaagaaataaatatgtacatactacaataatgatgtaagtggtatgaataaaatctactaaaataaaaacaattagtatttttatttttttaatttttagttgcccaggctggtcttgaactcctgagctcaagtgatcttcccacttcagtctcccagagtgctgggattactggcatgtgccattgcacccggcttcatttcttacttacatgcatgcaaaatatgaattacagagtcctggtatcaattattaggaaagccaagacttgcctttttcccagtagcagacactgtttcaaagcaaacaagcttagctgcctgtacctctaaatttcaactttcttgtggtttaatttctctcattattttttaaatttaatatctctgcagagtttcttttgagaggctgttagttaactgctctgagccttggctccttgtttgtaaaatagggccaataataacaggtaaatgagttaatgagctgaggcatgcaaaccacttaaaacagtgtccagcaattagccagatgctattatttttatactattggtattagtattgttgtagttgttattatttcttgcttgtagcttttagtggccacacccagaccacacaccggtatgaaaaaacaaacaaaaaaacaccttgaggtctggaaaaacaagatactaaccttgcctacagaaaggctaaatagttttaaatgccaccacttgaatgagatgtgatttcttttcttttctttttttttttttgagacggagtctcactgtgttgcccaggctggagtgcagtggtgcaacctcggctcactgcaagttccgcctcccgggttcaggccattctcctgcctcagcctcccgagtagctgggactacaggcgcctgccaccacgcccggctaattttttgtgtttttagtagagacagggtttcaccgtgtcagccaggatggtctccatctcctgacctagtgatccacccgcctcggcctcccaaagtgttgggattacaggtgtgagccaccacgcccggccgagatgtgctttcttctgttaaaagttttccccctcgcaacccacccccccacacccagggcacagagaagaaatggggagagctggggaggtgttgcatttgtcaggtttgtacaatttggggggagcttttcatagccatgggactggagtactcctgaatccccagcttcctaactactgttgaaacacacaccctgctaatgagagcttgttaacttacgtccttctagatcccttgggagcctgaatacagagaagggtgctggttgatgtaacagtttgattttaaattctgtcttcctcaacagatacagcttccattagaacatagggaagctctgtgttggtgaccaagaaatacttgcagagcattcgcccctgcctacacctccagcgtcactttctactgttgcccccacttttgttctccagttgcattggtttcctcttcttctttgaatcagccaaattccttactgcctcagggcctttgcacgtgccttttctttccccttaaacttcacgagtttagcttctttgtgtcatccattctctgctcaaatgccacctctccaaggaggctcccctgaccacctttttgaatattggcccttattgtttactatcctaaaaccatgttttattttggggttaacctttaccactctctgaaattgccctatttatgcagattcttgaccacagagttttttattttttaactttgttcctccagcccttccagcagctttgcaattaatcccctgtattaaatattctcttgtaaaaatacctaccagatttctcttttccttcctcaagatattttaccagcacttgctagaaaactgtcatattacagattttgttgaaacaagacacttaactaccacacgcctgaaaactgccaaaactgacatctgtaacacggagtgcccctattagatatggtatctttatgcagtgcacaacctgcccaaccatacaaaacagccctgatctttccctctagatccgtgccatccaatacagtaactgctagccacatgtggctactgagcacctgaaatgtagctagtccaaattgagatgtgctgtcagcataacatatatactcactttcaaagacttaatatgaaaacaagaaaagaatgtaaagtatctcattcataattgttttatattaattacactttgaaatgattgtatttgggatacattgggttattaaagttaacttcacctgtttcttttttacttgtttttttttttctttttgagacaaaagtgtcactctgtctcccaggttggagtgagtggcacgatctcagctcactgcaacctccacctcctgggtttaagtgattcttgtgtctcggcctcctgagcagctgagattacaggcgcccgccaccatgccaggctaatttttgtatttttttttagagacagagtttcgccatgttggccaggctagtctcaaactcctgaccaaaggtgatctgcctgcctcagcctcccaaagtgctgggattacaggtgtgagccactgcgcccagccttttttacctgttttaatgtggctactaaaaaactggaaatgacataagcagctcagcattatttctactaaacaccactactctagggtatgagctctgtgagaacaggggtcctgactgtcttggcaattgctggattctcagaatttggcaacgctccatgttaccgagttggcactcagtgtgtatctgctgaataaagagaggtgtcctcacctggcaggagtctctacctgctttgtcaccggcgcagaacatggtgtcatctatctgtctcgggtaagcatcctcgcaccttttctgacttagcacgctgatattcaagcactggaggaccttagggaagtgcactgtcaaacaggaacacaatgagaagtggagaaagatggaaggcggcagagatgggtcggtatcaagaagaacctggacactcaccttgggggctcttggttgtcccccagccagacaccaagcactttgtcccagcagagggacaatgagaggagacgttgatgggtctgacatctttagtgggacgaattcttctgttcagtttgatgagcatgaggtcgttagagtggccagggtgggagtagccagggtgggggatggatttgaccccctggaacatctgctgcccagattcataaactggtgacagggagtagtggccgagacggactctgaaaactctgaggaagatggggcaggtcaccaccaaccctgatctctatctccacgtccaacgccaatcccaaccccacacccagccccagccccacccccatccccacccccggtccccaaaccatcctcaactccctcttggtctccaatcccatgcctgtccccatcccagtcacaattccaaacccatcccattcccaaccctaattctttccctacccagaagccatcaccatatgcattctcaagcccaaatccaaccatctccaaccccacccaaaactccaatccccatccttcattctatatctgctcccaatctcaaccctatctccatgctatcttcatttccaccccagcccgattttcacccacccccaattctaaagccaatcccaattccacctccatcccaaaccattcaacaaatatatgctcctaaccccaaatccaacccatccttggctccttcccattccctaccacaacactctcccctctccaacctcatcctcccaccttgctcccccgcaaaactccatccttagtcctatccccaactcgacctcctcctgctcccacatccccaacccatccccaccaaccctcaccttccatgacacccccaaccccacttccccgtccccaccagccctcacctccatgacacccccacccccacttccccacccccacccccacttccccgtccccaccaaccctcctcttggaactcccactcacttcttcctgcagtgggcggccgtgagcagccactgtggatgcaccaacaccgccccgcagtagagctggttgggccttagcaacagcgcggcctgccacggctgggtgtgcatatcgcagtcggatccattgatgatgcggctgctgctgtcatccgaccgggcgtcttccccggccccagctcccaggtcctggttgctcccagagggcacggtgttagaggggtggtcacaggaaacatcattgttggcgagaacatgctctgggaacggaaaatgggttgggcggggctcagaggcggggcttgggctgggggtgggtttcagactcaagaggccagaccagctagagggtgggtgtctgacatgctgagggggcaggggcagggcctggagaataagagtggcacctctcaagcccaggctcaagctcaaggacagagcccaggctcaggtagggttactggactctaactggacctcacagattcctggaattggctagaactacatgtgagggtaaaattgggtacaggattcctggacaagctcaggggtagtgccaaagctgtgggggctggagcctggggatgggagggagaccagggctttagggatggaactggtctcaagaagtggggtcaggcctcagtgagtggggtcagggctggaggcaggaaggggtttggaattgacttagttagggccagggtcagggttacatgttagagtctcctataaagagctctgactttgggctgggggcggtggctcacgcctgtaaccccagcactctgggaggccgaggtgggcggatcacctgaggttgggagtttgagaccagcctggccaacaaggtgaaaccctgtctctactaaagacacaaaaattagccaggcgtggtggcgcgcacctgtaatcccagctactcaggaggtggaggcacgagaatcacttgaacctgggaggcagaggttgcagtgagccgagatcacgccactgcactccagcctgggagagagagcaagactgtctccaaaaaaaaaaaaaaaaaagctctgactttgaagggggttctagaaggtacccacagaatagggggtggagcctggcccaaaggggtgtggccttaggcggggtccactagagtctggcctaggggcgtggttgaggaaaggaggtggggtcagagctcatgggcggagctagggttccgaaagcaggaccaggaaagaagggctcagcttagggggccacatggaggggaagagcaggcctaggtttctgaattctcagatgaaaacatgccttctcaatcctgtcaatctcctcctctcacacacagacctacagactacatgcatgccccactccatcatcagtcctcccgtgcccattcactggttcttacccttttttttttctttttttctttcgagacggagtttcgctcttgttgcccaggctggagtgcaatggcgcgatctcggctcaccgcaacctccacctcccgggttcaagcgatttttctgccccagtctcccgagtagctgggattacaggcacgcgccaccacaccagctaattttttgtatttttagtagagacggggttctccatgttggtcaggctggcctcgatctcccgacctcaggtgatccgcctgcctcggcctcccaaagggctgggattacaggcgtgagccaccgcgcccggcctggttcttacccttgctgatggccctggcaccaccatcattcacgaactcaccccaagaaccacgcgcacaacagcagtaacagccaagcacgcacgcagttctgcagacacgcccatgttgcctccacaggtgcagctaacatacagctctgtctccaggtacacacgctcccgggcagcctagcgggatcgcacaccctcatccacagtgtctcagtgccacgcacagatgccgtgtgtgcacagatgttcagactgccacatactcttctgcacacaggcacacactgcaagtcagtcacctggcacccatctcccagagatagctacccctgcaccctctatccctccaggcagagacagaaactccagacacacagctgcaccatcacacatacagtagcatttacacggcctcacacagacacacacagtcacatacagtcacccctacacagagcttcaggtagtcacacggtcacaaatacgggcatccataacgtcacactcagccacaatcacataatcgcctgcaagcagcacacagtcacagctttccatggtgatgaccacttttgttgcacgcaatcccgggacctcagggacaggaactgcagatacctgcagtcatatacaatgccaagtcaccacacacagccaaacacacagtgaacacccccagtgctacatgcattcacccacacagctgtggagccacacacaatcttaaatgcacacacaatcacaaaaccacacacacagcctcaaagggtcagtgccacctgccgcacagtcacctgatatgggaaaaggcatccccctccccgacacacaccgtggcagtcacagggccacatacgatcgcacaaccacaagtacagacagagactcacattcacccggtcccggagtcatgcccaggctcacacagttccccaggggacaggcgctctagtgccgcagagacagtcctcccaatcccacaaccctcccaccccagagttctggttacctgtgacccccagaagcaaggctgtgatcagagcacagagcacccacatccaggggggtcttgctgtagccatggccgctgcacctggatggggaatgtcagagggttgggaggcccaggcgatccggggagcccttaacccacttcccctccctcccctaccttatttccccaggtagagaggaaccacaaggacgggccaccatcggcactgcgctgagacccaggcactatagaattcagaagataggagtctagcagcctccagacagggcaaggaggggacagagaaagatgtgggtgcaggacgcacagacacctctccttccctgcctgctgagccaccctcaccaggtctcacttgccctgtcccccaggtagggggtgggggatttgctcccagctcagccgcagacttctcaggcctgtgccttcctggccactgcctcctcctgggctctgggcaccgggcctgagttataaccacccactgctccctggggcacattcccgggcaatgaggtgcctatcgggccttagcaatagctcctcctgctccccctatctccacccccagagcaccccccacccagtccggaatgtcactccctacctccctggcccggagaatggggaggggtctccggaagccaggccagccccttccctgcctcccccagccttaaggatctggcttctcaccaactctgggtcactattcttggcgcctggattgcttgctttcttctctgcattttgctcattccaccactgtctgttcaccctcgatactcctctttccatctttgtctctggttttttctcagagtcttcttccatctctctgtggttctccctcggctatctttctgagtctctctcaatatctcgtgtctctctccacccctctctctctttctatccctctcgcctctctgtctctctgtctctgtctctctctctctgtctttttctctgtctgtctctcactcactctctctctctctcctcctgtctgtcttaggagccttgttttgttctccttgggccacaggtgtttctgtctccctgttcctccctgtctttctatgcctctgtgattctttcttttttaaaggttctgaatgatttgtcaaatataccttagagttcttggcccatttattttcctttatttcacttctgctctatttgttgacagcattttttttttagatataactaaggtacaacaaactgcttgttcgtttgtttatttatttatttgagacagagtcttgctctgtcgcccaggctggagggcggtgatgtgatctcggcccactgcaacctccgcctccagggttcaagtgactctcgtgcctcagcctccagcatagctgggattacaggtgtgccccacgacacccggctgatttttttttttttttttttttttttagtaaagacagagtttcaccatgttggccaggctggtctcaaactcctggcctcaagtgattcacccacctctgcctcccaaagtgctggaattacaggcatgagccacggtgcctggcccaaactgcatatttaaagggtagagtctgatggctttaggtacttgtcacatcagcatagtcaagaagatgatcatggccgggcgcggtggctcacgcctgtaatcccagcactttgggaggccgaggcgggcggatcacgaggtcaggagatcgaggccatcccggctaaaacggtgaaaccccgtctctactaaaaatacaaaaaaattagccgggcgtagtggcgggcgcctgtagtcccagctacttgggaggctgaggcaggagaatggcgtgaacccgggaggcggagcttgcagtgagccgagatcccgccactgcactccagcctgggcgacagagcgagactccgtctcaaaaaaaaaaaaaaaaaaaaaaaaaaaagaagatgatcatagacaccaccctgaaaactgtgcttctgcccctttgcgtgtatctgggactctgttaatctctctttctttacacctctgtgtctccatttgtgtctttctctatcttctcttttctctctgactctgtgtgtccctgtgtcccaggctctctgtgtgttctctctgtgtttctgtagttgtgttattctgtctctctctctctctctctttcttccccaccccttcctccttccctgtctttctgcctccctctccctgcattttaggcaggggagactcaagccactttgcagagggagctctcaactccttctcttgccttcactctgggcccaggccgtggagcacaaagaggcagggacccagtctgggaatctgcaggtgccgtggcccggctggtgtggccaggcatgggtgagagagttgggcagggctacttgttattgggaaaatagatcaagaggccaggagaggggcagacggcttgggaaatgggcattgggtggggaacccgaaaggtggcttctccctctccactcctgagccatctgaggccacctctcctgacctcgtctctacgccagcttttctttccatctgccgccagctctttgcatctgtcttcgtgtctccttgtctctgtcctcactaggaagcaagagctaatgaaacattcatctgtgatgtgccagacacaggtgtctgtgaacaatcagactcaggtgtccgtgaacaaaatgacaaagacgcctgaagatgctgccttctttgagccctcattccttgagggcaaaaaaacaaccgagctgtgttgctcacatctataattctgttaaaggggagattttagagcactcaggactggttttagtgcacagggaaaataccaaaaaacccaaaataacaaaaacctattctgaggtttattttgattatgacaattaatatttcattcattaaagtgacaaaaccgtggccgggcgcagtgtctcacccctgtaatcccagcactttgggaggccaaggcaggtggatcacaaggtcaggagttcgacaccagcctggccaacatggtgaaaccctgtctctactaaaaatacaaaaattagccaggcgtggtggcgggtgcctgtaatcccagctactcaggaggctgaggcaggagaatcgcttgaacttgggaggtggaggttgcattgagctgagatcacgccactgcagtccagcctgggtgacaagagcgaaactccatctcaaaataaataaattaattaattaataaagtgacaaaaccagcaacctatttcttccttagtcttttaagttgtttgcaacccattttggtctagataaatcttttttttctttctttcttttagacatcagttgcttttaagttttttttttttttttttttttttttttttgagatggagtctcactctgtctcccaggctgggtgcagtggtgcgatcttggctcaccgcaacctccgcctcctgggttcaaacgattctcctgtctcagcctccttcctgtgtagctgggactacaggaggcacaccggctaattatttttttgtatttttagtagagacggggtttcaccgtgttagccaggatggtctccatctcctgacctcgtgatccgcccgcctcagcctcccaaagtgctaggattacaggtgtgagccaccgcacccggcctatggggtcctcataataatgcttggtcctattcacaaactaagttaattaaacaccttcagacattttaaactacatttctaaaaccaacatattcaatctcttctggaagtcccttgatttttaggcaccacttccaaagcattgaagtgagtttgtacatctgagtgtattacactcataaatatgacccatgttgcattctttcagatatcccaatgctggatattaacttggcgtaactccatcttaaaaaaatcacagctcaattattacacatttaaagctgaagtcacaaggctttccctataacaggtgaaattctcttagacacacaagcacctaaaataccaaaagtgtagagattctgcttcaaaaaaataaaattcataagaagggttggatgtctaaacattttaatgctcagttccaaaacatctcagaattacaagaagacttcagcacagaagagtggttaggagcccaaactgtggaaccagcccctagcatttaaattctggtgtagccatctactagctgtgaggctttgatcacaccatggaccccctctgtgccttggtttccctgtctgtaaaatgggaacaataatggtatccacctcacaggcttgtgatgaggatcaaatgagttaatatatgtaaggcacttagaatagtacctggtaagtgctaatcagtatattttaaattattattattactgttgtcatgactatcattattcttattatccattcagaaagtcaatttctttctgaatggctcacgcctgctatcccaacattttgggattctgagattcatggatcacttgaggtcggaagtttgagaccagcctggtcaacacggtgaaaccctgtctgtactaaaaaaaaaaaaaaaaaaaaaaaaaaaaaaaaaaaaaaaaaaaattaactgggtgtgctggcacacagctgtaatcccagctacttcagaggctgaggcaggagaactgcttgagcccgggaggcagaggttgcagtgagccgagatcgtgccattgcactccaccctgggtgacagagtgagactctgagactctgtctcaaaaagaaaaaaagaaagtcaattttctctcaattaactgcagctgattttggtctggaccgtcattggctgggttcctcttggtgaccctggtgaatttcacggcttttccggagaaggttgctcaaggggggcccaggtcattcacatgacttcataattccatcaagtcacaaagtcagccacttccttccatcacgtccccatgatagaatgttgcatttctctgattcttaaggcaaagatcatagggtctttctaaagcccagatccgaccacgtccttccttttctccaggccctcgggatcaggtccaagttcttctgcctggcgctcagtggcatcatcttccgctgacctacatttccagccatatcattcatttctcccacctcaaacgccagcctccaccatccaggacgattcacaggtgtcctcacacccccaggattgtctacatgttgttccttctgtgagaatgccacccacccgaacttctccaaagggtgacctcatatccagccttcctttccacccctcctgggcccagccccacctcaactctcatcttctctccctgcatcatcacctcaacctcctccccagccccagcctccagggtctcccctctggttcatcctgcacatggccctagggctgccccagctcacagactttccatggctccccagtgccctcaggagaaggtttcagcctctcatgctggcatctgagatccttggggatctgatccctgccctcctctcccatcaccgttacccatgcatggtggtcttcctaccctcccaccttcctggtttggctgtgacaaaagtttaggctgggcgcggtggctcacacctgtaatcccagcactttgggaggccgaggtgggtggatcatgaggtcaggagttcgagaccagcctggccaacatgttgacaccccgtctctactaaaaatacaaaaactagccgggcatggtggcacgtacctgtaatcccagctactcaggaggctgagggaggagaatcgcttgaacccgggaggcgaaggttgcagtgagccgagatggcgccactgcactccagcttgggtgacagagcaagactccatcttggggagggaaaaaaaaatttaggggcaaaagccatctttgaggtatagcacaaggtggaggcatcaagagtgccttcctggaggggaggaaaaatcaaattggctgtaaaggagaactgagaatatctagatttcagaaaggtggacgtcaaatcaaagcaaaaagccccactcataataaaattcattctttattgagtgcatggtggcccaggtgctattccatgtatgtcataggtgtgaaaccttaaatctttccaacagccactgccttatggagactgtatcatccttatcttcatcttacaggtgagaaatctgcagtgaagaaaggtacatcccaaggggacaccgacagtaagcagcggagctgggattccagacacgtggctgggcctctgcaggaagaaatcaaacgtgtggaagggttggggagaggagatgcctagaagggattttcctgtattctcttagtggtgggggtaagaccgaggacccaagtcctcactcatcacgtcctccccagtgatgcaaggatggagctggggtaaaaccagggagaatcaggaccctcacgtcgctgcgtttattaagcatcagggtcagagctgggcaggagaggaggggaggcaaggtctaggtgagagacgttctggaaccagccagtggggtggtaggtcgggaggtagatgtcacatgtcagggtcacttggcctgaatggttttttggatccagttcgtgtatctgcagacgttggtgtagactcctggcttctcctttgatccacaggggatgttaccccatgacacaaggcctcggaggtggtctccacataccagcggacccccagaatcaccctgcaggaaagagggagaaagtcagatacagatagaaacccagagactgtgtgtgtgtgtgtgtgtgtgtgtgtgtgtgtgtgtgtgtgtgtgacagagagagaggtagaaagggacagaggtacttactgaaagatggagagaaagactcagggacagagagacagagagagagacagtaagacacacaaaggcacagagagagaatggtagagagagaataaaggagactcaaagacacagagataggaatgccaagatgcagaggaacatagagagcaagaaagagaaacaatttaagaatggagactgagaggtgtggagagaggcagaggtgtagagaccgatggagagagaggaggaggaagaggagaaggaggaggaagaggagaaggagaggaggaagaggaggaggaagaggaggaggaggaagaggaggaggaagaggagaaggaggaggaggaggaagaggaggaggaagaggagaaggaggaggaggaagaggaggaggaagaggagaagaaggaggaagaagaggaggaggaagaggaggaggaggaagaggaggaggaggaagaggaggaggagaaggaagaggaggagaagaggaggaaaaggaggaggaggaaaagggggaggaggaagaggaggaggaggaagaggagaacgaggaggaggaagaggagaaggaagaggagaaggaggaggaggagggggaagacgaggaggaggagggagaggaggggggaggaggagggggaggaggagggggaggaggatggggagggggaggaggatggagagggggaggaggatggggagggggaggagggggaggaggagacgataagacccaggtgggagaggtagggagggcccagggagagatatgcctggcactattctgtccagggacacctctccacctcgtgtcttgaggacagtctcgcccacctgccctttctttgcgtccaacttgctatgtatcgctttccctgtctctgtccctgtttctgcctgtgtctccgtttctgcctgtgtctcccccttggttggtctctgcacatccctcagtgcattagtcattctggcataaagaggagagcctggatggatgacaatggaggaaacccaagttaaagtattcgggagggagtcccctttccccagctagtgtctccctcctccagagcctggtcgtttctgagcaggactcgtgggggctctgtttgaggaaggacagtcccctcacaccatctgcttccttactacttctctttggttctttttgtttttagacagagtctggctctgtccccaggctggagtgcagtggcgtgatctcagctcactgcagcctctgcctcctgggtttaagcaattctccagcctcagcctcccgagtagctgggactacaggtgtgtcccaccatgcttgcgtaatttttgttttttggtttttttttgagacggaatcttgctctgttgccaggctggagtgcagtagcatgatctcgactcactgcaacaacctccgcctccaggttcaagtgattctcctgccacagcctcctgagtagctgggactacaggcgcctgccaccacgcccagctaatttttgtatttttagtagagatgaggtttccccatatcggccaggctggtctcaatctcttgacctggttattcacccacctcggcctcccaaggtgctgggattacaggcatgagccactgtgcccatcctaatttttgtatttttagtagagatagggtttcaccatgttgatcaggctggtctcgaactcctgaccccaggtgatcctcctgcttcggcctcccaaggtgctgggattacaggcatgagccactgtgcccatcctaatttttgtatttttagtagagatagggtttcaccatgttgatcaggctggtctcgaactcctgaccccaggtgatcctcctgcttcggcctcccaaggtgctgggattacaggcatgagccactgtgcccatcctaatttttgtatttttagtagagatagggtttcaccatgttgatcaggctggtctcgaactcctgaccctaggtgatcctcctgcttcggcctcccaaagtgccgggattacaggcatgagccgctgctcctggcctctctggttcttgatcccgcggcctccatccttgtctctgcacttcctgtctctgctggctgtgtctttatatctctgcatatccctgactgtgtctctgtgtgttgaactaagtctcttcttttcaaggcttgggttctccctcagcctgtctctatctgtctctgtaaagctctcttttggcctgtgtctctctcttcctgtgtctggccatgtttttgtgacttcgtcctgtccctggctgtgtaagtggcagatccgggtcacctcacctggcaggaatccttcccgtacttctcatccccagcacacaacatgttctgggtgatctggccagggtaggcatgctcacactcctcacgggacaccaggtggatgtatgcacactggatggtgtcagggaaatcacctgttaggggagagatgggccagactcagcccaggccttgcactcccctcatcctccccagtcaccccccaacccctataagtcctccatcctctattggtccctcttttctattggcacccctcttcctgtttgtctctcattcttacatctcattaccatcgtccctgcctcctaattggtccctctttctatcattcttcccccccattggctgtcttcctcattaatagtctcttctccaggagtcctcatttcctattggttttccttttctcttaggtccctcctccacttttctctcttccactggtcccaccttcttcagtagtttcagttgacctggaggactcttcctctgttacgccctcctctactgtacccctcctgatcagtagtccattcttcattggacacttcctgcccattgattcatcttgattggtcactctgtgaccattggtcttttcctaactggccatgccctctcccattggttcttcctttctattggttcttcatccaatggtccacctccatcattggtccttttctaactgtccccaccctccctcatggatcctccctttctattggcccttcctccaatggtctaccttcctcattggtcctttcctaactggccctgccctccctcattggctctctcttcctattggtctgcttccctccttggtccttttctaactggcctcaccatcccccactggctctcccttcctattagcccttcatccaatggtccacctccctcattggtccttttctaacttgccgcatcctcccccattgtctctgccttcccactggcccttcatccaatggttcacctttcttattggcccttcacacacaggcccaccttcatggatcctgctgatctattggacctgttttttcctctagtgactcctctggaccattgatcctttccccttagtccctcttccatcagctatacccccattcactgtctcaattcacatccttcagttggcttttgtgctttattggtttctcttcttccatcagttccttctccattattccttcctgctgttcaatgaatcctgatcagtcccctttgacctttgacatccttcctgattagcatctccccactgaccttccctctttattgaaccttcatcttatgttccatctctcccatgctattcacccattggtctacattttccattggctgttcactcactggcccagctcccaaattcactctccctcccccttgacctttctcccattgaaaccctgtcccattggtcctcaccattagcccatcttcccatggcccctcaccaattttcccactccccatcctttggcacacttccccaagtagccagtagcctgctccccaccagcctcccactactgaccatctgctgtcttgccccagcccaggatgtggcagctggtggtgttggctgagcagtccctctccaggggaaggggctggatgagttcagagagtttggctgggcgtgccaggcgcaacagcatgatgtcctggtcatggctggcggcatcatagtcagggtggatcacagcccggacaacagaactctgctcctgggaactctccctttgccgaaggttatgcttccccaggaagacctgaagattcctgggaaggaagagggctgggtctcacctggagcccttgggctgcagttgaggcttcagagagggctgggaagtcatgaatcgctggcctgctcctcccacagtcttccccagctgggtaaatggcaattccatcctttcagaataatcttgggggctattcttcactctctttatttcatgccctacatccaagctgtccagaattccttttgcctctctgaagcatatccagaatctggccacatctcacctttcccacggctaccatcttggtttgagctgccttttcacttcctacctgaactagagcagtagcctcctcactgggctccctgctctgtctctggtcccccacagtccatcctccacaaagcaaccagagatattttaacaatgtaagttggtcctgtgcctcctctgctcagcccctcctatgactcccatctcactcagaatcaaagccaaagttctcaacgtggcacaccaggccttgcaagcactgccccatcatctcacagacatcttctcctcccactctccccttctctccctctgctccagccaaacgctggcttccctgtcttgccttgaacacaatagtgatcttcccacctcagggcctttgcactgctgttccctctgccagcaagtctgtcctccaagtatctgcatagctcactccctcacttcctttaaatgtcgcctctcagggaagccttccttagttgcccaattaaaatacaaatacctgttagtaggcaattcctatctccctcccctgctttctgttccaccagagaacctatcacaatcatccgacctgctatatatttattgttaaatatttactcattgtgttatttctcctccttgcagagcaatgctgtccactaaatgctacgatgccatgatctcgatctgcactgtccagaggtggctgggggaaccacaagctacaggtggctgctgagtacttgaaatgtggcttgtggattttccatttcattaatttcaatgtaatttgctatatgtggctgatggctaccatattagacagtgcagctctaggatgtcaagatggggatttttgttctattcagatatagtatctccagtgcgttgatcagcacctggcacaggataggtgtttgatacatattcctgaaacagagagtcactcccttgctcagacatcacccatggctccccattgtcctaagaataaagcctgggctcctccacttggcactggagcccctgtgtgatctggctgtagtcactttccaaccttatctcccagcaccttctgccccccagtgaacgggaaattttattttctgagaatactcaagacggttctcacctcaggggtgttatcacagcctttcctctgccctgaacattccttttcccatcttcatgcctccgcttggattttatctcattagaaagtccttcctgaccctcctccatctaaagtaggtacccgtattcttttccttcataatttgtaattatatggggttttgaagggtttgcttcttttgtttgtttgtttttttgagacagggtctcgctctgtcacccaggctggatctgcagtggtgttctgtagatcacagctcactgcagctttgtactcctgggctcgagtgatccacccgcctcggcctcccaaagtgctgggattacaggcatgagccaccacggccagcccaatttgctgcttctttctttcctttttttttttttagacagagtctcgctctgtggttcaggctggagtgcagtggcgcgatctcggctcactgcaacctccgcctcccacgttcaagcaattctcctgccttagcctcccaagttgctggaattacagaagcccaccaccacgcctggctaattttttgtattttcagtagagacagggttgagccatgttggccaagctggtctcgaactcaggtaatccacccacctcggcctcccaaagtgctgggattacaggcgtgagccaccatgcccagccctcactttgcttgtctgcacctttctgtccttgtgctcccgagggcagggatgacgtgtgtgtcccatccattgctgaatctccactgcccaactcgaatgtggcacttagcaggtgctcttagtcaatgtacatcaaaggaatgaatgatggtggtgagagtcatccaaggtctccttggggtcaggggaaccaccccagggattgtcacttgctatttccctgcacctcagtttcctcatttgcaaaatggtgccaagagtcccttgtggtgggcattccaggaaaggtgtgtacatggtttcactcagcacctgattggtagttagcatcaaacaagtggcagctgtcgtgaatctgactagtgaggatcagcgcccagggtttttgtcctgggccctccagctcctccaactatgccagctttttggatgatctcatctagtcccatggctttaaatacacctgtttgctgacgatgccttcattttaacctccagccctgacctctcctctgagctccagagtcctccctggcctccctgctgggacatctccccggcatctccaactcatcgtggctaaagcaaaatgtcagatgctcccctgcctacacccggcctgtttctctttccctctcccacaactcagagaaagacgtggcaaaacacccagttgttcaggacaaatacacggaagccagccgtgcttcttcctctccctcctgttcctcgttgccagattctgctggctcagtctcagaattccacatcccaagatattcaacatccctccatccccactgcgaccgcctgggttcaagccaccctcctatgtcgccggatgaaagcaacagcccccacgtgggcctccctccctctctcttgcccagaccacgttccacgtggtagccagggtgcttgtaaaaatgtaaatcaggctgggtgtggtggtggctcatgcctgtaatcccagctctttgggagggcgaggcgggcggatcacctgaggtcaggagttcgagaccagcctggccaacatggtgaaaccccgtctctaccaaacatacaaaaattagccaggcaaggtggtgcacacctgtaatctcagctacttggggtgctgaggcaggagaatcgctggaacctgggaggcagaggttgcagtgagctgagatcatgccactacactccagcctgggtgacagagcgagactgtgtctcaaaaaacaaacaaacaacaaaaacaaaactgcccagtggcttcctactgtgctcagaattaaatccaaatgcccatcacgccctgcaggtccccaaatgatccaattcccccattagaaagtaagttcaggaaaacagcaattttgcttgtttttttttgttttcttttttttattttcttttccactgctatgcccgcagggcctggcacacattaagtactcaattaagcaacagccgaatgcacctggctatcagatggcctcgtgctgggatgggggggatgcctatgtcacctcctgcctgacatctataagacaccctcagggttcagtcgcatctgctgttcatttacagtgtagactcacggttttttgcagtgggcagctgtgaggacccacagtggatggataaggaccccaccacagagcaagtggcccgaggtgtagagggcagcttggtaggggtgagatgtcttgtcgcagggtccgccatgcaccaacttattctgctcctctgcccaggctgagggagagaagatctgagtcagagaggagttctggagaaaccaagcgcatccccctcaacatgaactccagtcaagattggtcaggtgcagtggcttatgcctgtaatcccagctgaggcaggaggatcgcttgagcccaggagtttgagaccagcctcggtaacacagtgagacctcatctccacacacacacacacacacacacacacacacacacacacaaattagcagggtatggtggcatacgcctgtagtcccagctacttgggaggctgaggtgggagggtcacttgagacccaagagttcaagtctgcagtgaactatggatcatgccactacactccagcctgggtgacagagtgagaccctgtctcaaaaaaaaaaagcttctctgtatttccactcccaaacttaccccattcccattacaaacccaactgtatcccctattcccgggctctctccaactttccaacctacctcctacctcttctatgtttagatccccatccctaaagccaaccccaccccaaaccctcatatcttcaaacccacctcccaccaccctccctatctgtattccccacccttagcctaatccccaacgtcttcctcatttcaaagctcccccaccccaaccctgtgcatatccccatccccaataccagcctcttctccatcaacaagcccaaccctgtctgcaagcctcccccatccaaatgccctttccccacctgcagcaatcagactcagcaccaccatcagcttcttcatggccgctcctgagaggggaagccacatggtccattagtcactgcctcgaccctccccccatccctctgtctgctccctctgcatcctctccttccttcctggcctgctatggtctcctgccttgacctctgtccttcccatctagcctcctgatttattcttcctcagcccacatcttccatcagaggatcccacgaaaacagtgccaaagagaattcagaactacgtccactggtccagtaacccatggtgagattctgattagatctttctactttcttgggcactgatttgccttcctgtcgacaggagagggttaccctagggggccctagcgttcttcctctgtatgggagttttcctcggagcctggctctgtgcgcaatggccacccaccccgcccacccggcaggttctgtgatgtctgtgatctcacctgctgcaggcctccgggctccggggattcttgagtcgggggaaggaacagctttgagacgaggaggcagaaagagttagaaatgcggggagccgtgaggagagaagacactcagatgcagtggcagagccaagcggaggacgcaggggccgcagagcccagggctgcagggactgccagacacacacccccagctcccaggcctccctggaagaggctggttctgtccccagatgcttctggaacgtccttttaacccctgtctctcaggtccctgagccaggagactggctacacccttttcctccttacccaggcctcccacacacattcctcccgcccccacgctctgctcttggtgacccctgaccaggcctccagggaagggagcactggtccctgagtgcagtgagggcctggactcctgggtctgagggaggaggggcttgggggcctggactcctgagtctgagggaggaggggctgggggcctggacccttgcgtctgagggaggaggggcttggggcctggactcctgggtctgagggaggaggtgagaacttggactcctgggtctgagggaggaggggctgggggcctggactcctgagtctgagggaggaggtgggaacttggactcctgggtctgagggaggaggggctaggacctaaactcctgggtctgagggaggaggggctggggcctgaatctgaggcagaggaagttctagtcggctcagtccttagacctccgggttttggagaaagaaagtgtctgaagacaaattccggcctctggggcaagcagatggtgccccaggcctccctgcacccccagcactctctgtgccacccagggacctgcaggccctcactccgggctctagagccctccggcactgggaagcagcctgcccaggttcagtgcggttggggtgactcacacacctgcccgtaggtccctctgtgtgctgcctgccgacctctgtgtccccaggagagagcgagccagccagccggggagacagctacagcgtgtgtcaccacactggcccccgcccctgccccgggctggggagcaggcccaggcgcgatggggaaagggcccaggaacaatcgggctttgtccgcccccagcaccccagtgccatgctcccagcagctccggcctcaacctctcttccggcgggcaggcgggagggcggttacatcaatggcttccttttgtccctgtctgacagtcctcctttgcagtctctgactgcccacctggccctgactggagatttcggcactccacatcctcctggtccttctcctccaagtctgcccacccctgaggtctcttgctccatctgtctccctggccatggaggggagggagcttccatctctctctctctcccatctcagtctctgtatttgtgtctctctccctctttttttctctctctcccttcctctctcccttcctctctcccttcctcccttccttccttccttctttctttccttccttcttttctttctttctttctttttttttgacggagtcttgctctgtcactcaggctggagtgcagtggtgtgatctcagttcactgcaacctccgcctcctgagttcaagcagttctcctgcctcagcttcccaagtagctgggattacaggcacccaccaccacgcccggctaaatgttttttgtatttttagtagggaagaggtttcaccatgttggccaggctggtctcaaactcctgacctcaggtgatccacccaccttggcctcccaaagtgctggattacaggtgtgagccactgtgcccggcctctctccctttctttccccttgattctctgactctccgtgcttatcttctcctgggtctcttcttagatttccccgggggtagcactgtgtgtgcccagaagggagtcagtttccccaggaagtagcggggatgattcccgagcgatgaggaagctagcaggatggaagaggacttgaggacttattgatgagatgcggacacacagcgagaggcatggagttaagcagaaatcggagagcacttgggaacgacgtggggctgtgataagatggtggtgctgggcagtagcagagggatctgggaagatttagggaggtgtctttgaacttgggcctagaaagctgagccaggcgtaggtcaggaggaaaggccgtgaaaatgcctggcctgggtgcacatgggaaaccacaggcagtggttggggtggttggtatgggctggagggtgagggtgtgtgcgtggcagagtggagagaaatgaggagggggaagtcactgcgtaataaggacaatgataggaatgaagtctggctcagcacctgcttgggctgggcactacaggtaacttaaaaaaaaaagttcttttttcttttgagacaaggtcttgttctgtcgcctaggctggagtgcagtggcacgatccttgctcgtggcagcctcaaccctcctgggctcaagcgaccctcccgcctcagtcttcccaggagctgggaccataggcatgagccactgttcccagccaacccttttctttgtcttgcattgaatctaattgtcatcttgcattgtgcaccccccatcactccagggatgaagactacttcggtattcagtatactctccgggtgctccctctcacatttggtccccactgacctcagcaccttcttctcaggacgtgctatcttcacagacagcaagtctgatgttgcacaacccagtgaccaggccctatccctctgcctcctctctctggggggtcccttcctctctgtacccacaccctcaaccccaactcagagctgcacctctcccacctggaccaggatccctctgttctctgtatcccttgccccagagagaccttcctgtgccttgtgctgaccttgcccctcctctcacagacgtgccctgggtccccatctcccttgggaccaagtcccagccccccagcctggcatttgaggacctttagcatccagggaagtcctggccaatgaaatgtgatgccaagcacgcatgcacatttacattttccaatcaccatacttttttttttaagtcagaagattttttaagtgtccttaccacaaaaaataagggtgtaaaataatgcatatgttaaatagcttggtttagccattccacaacatatacatacatatatcaaacatgatgttatacaccagaaatatatacaatttttacttgtcaattaaaaaataaatttaaggccaggcatggtggctcatgtctgtaatcccagcactttgagaggccaaggtgggtagatagcttgagtccggaagttcatgaccagcctgggcaacatagtgagaaaccatctctgcaaaaagtaaaaaaattagccagatgtggtggtgcacacttgtagtcccagctactccggaggctgaggcgggagaattgctgagcctgggaggtcgagcctgcagtgagctgtgactataccactgcaccccagcctgacatggctgggcaaggtggctcatgcctgtaatccaagcactttgggaggcagaggtgggaagatcacttgagcctaggagttcgagaccagcctggacaatatagtgagaccctatctctaaaaaaaaaaacaaaaaaaagaaaagaaaaaaattacctaggtgtggtggcacacatctgtggtcccagctatgcagaaggctgaggtgggatagttgcttgagcctggaggcccaggttgcagtaagccataatcacgccactgcacttcagtgtgacagagccagaccctgtcaaaaatttttttaaaaggagtcctgagtggtgagtggccctcacactgcatgacacagctatgtctacgtctccgtgtggctccagctttctagaacacatcaagcttccctgacccatgccatgccctctggcctctggcccttcactgaatgctattccctcttcttcttgagatggagtctcgctctgtcgcccaggctggagtgatgtggcgcgatctctcttcgcctgctgggttcaagcaattctccagcctcagcctcccgagtagctgggattacaggcacacaccaccatgcctatatttttagtagagatggggtttcaccatgttggccaggctggtcatgaactcctgacctcaggtgatctgcctgcctcggtctcccaaagtgctgggattacaggcgtgagccaccgtgcctggcctattctctcttcttagcatgttttccccaccttttcctggcaataacctgtccttcaagtctttacttggacattacctcctccaggaaaccttccctgaacaccacccagctgccacctgctgtagttggattactcattctctcacgtaggttcccacagcaggtgtctccctcaacccaacctggacggggggccacctggattgacattcgtcatctcttccactggaccgtgagctccttgagggcaggtacgggactgactcatccctgtgtcccaagcaaccacacaggaccttgcccagaagaagccttaggcaagactgaccaaatgactaaatgactttatcacacccactcccattttacagataagaaaactgaggctcagaacgggaagttcattgctcatcatcaaacatccaggaaatggtggagcctgaatgggaactcagcttccaacatggcgtggatgtggcccatcccttggtggcctggctgggtctatcttatgacagtacgaggtgagtgaacttgggaggaattgttgagagctgggtggggaaagaagggaggtgttaggctgtggggagtggagggactttgaagagaaagaaatttctaactctacctcttctctggtgaccttcatggtttgccatctctgcatactttgaatgcttatttactggatagtttgctccagattgtcttgctctgcaaaactcttcactaaataaattcttctgtctcggtgcagtggttcacacctgtaatcccagcactttggagggctgaggtgggaggattacttgagctcaggaattagagaccagcctggacaacatagtgagaccccgtctctactaaaaaaaaaaaaaaaaatcagcccaggcatggtcccagctactcgaaaggctgaggcaaaaggattgtttgagcccaggagactgaggctgcagtgagctatgatcatgccaccaaactctagcctggatgatagagcaagaccctatgtgaaaaaaagaaaaaaaaaattataaggaaacttcatgagactgtaagcagaaaaaagtgccagaagtcataaacaataaaaaccaatgcctgggccaggcgcggtggctcatgcctgtaatctcagcactttgggaggtcaaggcgggcagattgcctgaggtcaggagtttgaggacagcctggccaacgtggtgaaacttggtctctactgaaaatacaaaaattagccgggcatggtggcaggcacctgtaataccagctactcaggaggctgaggcaggagaatcacttgaacctgggaggcagaggttgcagtgagctgagatcgcgccattgcactccagcctgggtgacaagagcaagactttgtctcaaaaaaaaagaaaaactaaactaaactaaactaaactaaaaccaatgaccattgaaggaaggcttacctcgtgccacacaatgtttgagcactttctgtatattaacttattgaatctctgtaataaccctagaaagtaggtgctttttctcccatttcaaggatgaaggaacagggacaggggaagtaatgagcttaaaggaaaatagcttgtagggactagaactgggatttgaacccaagaagccaagatccagagctagtcccttaactaccacactatactgcttacccaaagaaaaatgaattacttaaaaaaaatcaacattagtaccatctcagtcattgcaaaccaatctacctgtagcttgcgtataggagagcagagggccagggccagggatctccaggctgacttagtgcaaatgcaatgttttgttactttttaaaattccagattgaatgttggagtgccttgcagaagagagagaaaatgttgctaaaacttcaggggaatgactggtcgaaaatgtttgacattcttaaacttgacaggcccagaaacagaaggggctggggacctgggctcctgggtctgagggaggaggggttggggcggggggtctggactcttgggtctgaggaaggaggggctgggggggagcctggactcctgggtctgagggaggaggggttggggcggggggtctggactcctgggtctgaggaaggaggggctgggggggatctggactcctgggcctgagggaggaggggctggggggagtctggattcctgggtctgagggaggaggggctggcggcggggagcggtctgaactcctgggtctgagggaggaggggctggggggagtctggactcctgggtctgaggaaggaggggctgggggcggtctggactcctgggtctgagggaggaggggctggcgggggggggggtctgaactcctgggtctgagggaggaggggctgggggtagtctagactcctgggtctgagggaggaggggctgggggggagtctggactcctgggtctgagggaggaggggctgggggggagtctggattcctgggtctgagggaggaggggctggcaggggggtctgaactcctgggtctgagggaggaggggctggagggagtctggattcctgggtctgagggaggaggggctggtggggggggttctgaactcctgggtctgagggaggaggggctggggggagtctggattcctgggtctgagggaggaggggctcgtgggggcaggcctgcactcctgggtctgagggaggaggggctggggctggtctggactcctgggtctgagggaggaggggctggggggagtctggattcctgggtctgagggaggaggggctggggttctggactcctgggtctgagggaggaggggctggggggagtctggattcctgggtctgagggaggaggggctggggggtctggactcctgggtctgagggaggaggggctgggggcctggactcctgcgttttctgtgttagcctcctatatgggagaatcagaattagcggctgcagaatttctgcaatatgacagggctgtggtgcctgggttaggagagactcagagggagatgagataaggaggggaaggatctggaggatcttggtggggagggaattctgggagaaaaacaggaagaacaggtaggagggcgtgtcctgggctggagtggctcctcggtcagcagcgtctgaggtgtgaccacacagaggatctttgatgttagatggctggggctgtggccaggctctgagtcacagaggactcctccctcatcctacccgcttcccgaggttcctttccctcccttcttggggagcaggtgccaccatcttcctccggcactgtttgcttacttctggcagacccccgtgggacccctgtgtcctgtctactgtcatcccaatccctctgaaaaccgccagcctccctcctcacttgtcactcgtgagatgctcagaaacactttcacaccccttcccacgctgatgaagttggcctgttctctcctccctcctcccttccttcttcctctctccatcctttcctctctctcccattttacagacaggaaaaactgagatctgggaaatggaaatatgccctggaacagggccggcaggaccagggctcaaaaccaggcacatatttctttctagtctcccttcctgaaaggtcacctctctccaatcttagatcttcagacttttttccccacctttatttttcatgttataaaagtgcacattcaaggaaaagtacacagaaggaaggagacacctcatgacgaccccagtatgcagtctgggacatgtgttttcagatctgattctgtgaatatttcattttttatgggtagggtcacatacatatatatttttgtccttccttttgtcatttaacatcctatagcctaaatgttcttgaataatactgacaattctgtctaagtatcatttttaataggtttgtaatatcattgtgggctggccgtggtggctcatgcctgtaatcccagcactttgggaggccaaggtgggtggatcatctgaggtcaggcgttcaagaccatgctggccaacatggtgaaaccctgtctctagtaaaaatacacaaaaaattagcctggtgtggtggtgcacacctgtagtcccaggtacttgggaggctgaagcacgagaatcacttgaacccaggaggcggaggttgcagtgagccaagattgcatcactgcattgcagcccaagcaacagagactctgtctcaaagaaaaaaaacatcgttgtgccaagccagactattatttaagccatctggtacttttggaacatgtttgatggtttcacttcatttctgtgataaataatatcatggtaaattcaagtcttgttctacattttggattttttttgtttcagtaggttcttcctaagattagagttactgggtcaaaggtggtgaataagggtctcggtgtacgttgaccaagtgtcttccgtaaagactgtacgaacgtccagttccagtgtttgagagtgctggtctcactgactcttctccagcactgagggttttgtgtttctttatttgttttggttttaggtctttaccaatttgattggtttatcaacagggcatgaggttggtttaaatatatctttgaggaaaggtaaagtcaaatttgacttcataggtcatcggcgtcctcactcctgtgcattttctgttggaagcacacagttaattaactcagtgtggcgttagcgatgctttttcatggtgtcatttatccacttggtgaacttgcacacttgagtgtagactcctgggtcattgggttggccgcaagggaaagttccccaggacaccagaccttgcagggtacctctgcacaccaacggtccccctgagtcaccctagagggaatagagccggagattaactttggcttcagatcaaagcccaactcattctcatacattcctcagttatcggtctttgtcttgcagattatggacttccaccatagccaatgagaagagactcattgtctctggggactaatgggagagctagtgctagggacacactaggtcctttgaagacactggtttgacccttggccaatgagaccaattgcagagaaggggtggggcttccaggatcagagcactctttattttccaatgttaaggaccctgctccaagctagtgggagaaggaacatcatctccaaggggtggatgcgtgccctgtggcgcaggaaagggggacacgatggtctcggagaccagggtgaagaccagttacataatttacaggacttggtgcaaaacgaaaatgcagggccctttgttcaaaaattattgagaatttcaagacaacagcaggaatgcattagactaagtttgagacccttctgagtgtggggctctgtgtccgtgcagagcttgcacattcatgaaactggccctcaccaggggagaaggggaacaccctattctctaggacagtcatctctctcccatctcctctatccctaacactcaccatcccacatcccctgacagctgaaggtgcagatgtgagcaaggaggatgggtgtggagagacagagagagttggaggtggagaagaaagagggaaaggagagagagacaaagagagatgaggaagagggaaagggtatggggagagagagagacagagagatgggggtggaaaagaaggagggagaagagagacagacaaagagatgagggagatggggagggtgtgggaagagaagagagagagagatgggggtggagaagaaagagggagaagagagagacaaagagaaagggggggaaggtgtggggagagagatggggtgggggtggggagaggagagagagactggaagagaggaggagaataaagagagagaaagaaagacagagatgggggagcggcagggagaggagagagatagaagaaagagaaagagagagacagtaaaaaggagggggcaaggagagatgagggagagagatgaagagagacagagaagtgggggagagagagaaagaggagagggccagagaggagacagagagagaggaaaaaagagagagcaggggggcagggagaggagagagggaggggaggagagagagagaagcaagagaaagagggagaagacagagagcagagaggagggcatggagagagaacaagggagggagagcaagctagctcaacacagagaaaaaacaaagaggaaaagaatgaaatgaaattatgtcacaaagagagatgtgggaagactgttcagaaacagaggggatgacaaaaggccagaaagagggaacagagaggaggtggagagaaagagtgttttccccgggaccagggccagggtcaggtgagtgagtcatcagcttcaggcacaaaatctcagtaactgcaatacacaatacttcaatgcagtacttaacgaaatcaaatgtaatacataaaactgcatgatgggcatggtatccacattttaaatgaagacagtgccagtacagcgctgtgctgagccacgctagtacttacggcaagggaaaattcagtaagatccacctgctctttatttaaaatgtgacattttgtccatcatggacttctgcatgagtttttatttttatttttaaatattgcattatgatttatctcaatcactgaggtttttggtgcccccttaaggtttgggcctgaggccagcacctcagtctccttccctggtcccacccccactttctcacccctattaaactctctgtctcatccccagggccacattggcccctaagtaaactcccacccctgacctaggcagagaatgaggtggaaaaagctgaggaggccaggcctggggggagggcaaggccgggcttggtacccagtcactcgggtcaagctctgtccctggggcatgcagacagggtacccaggactggggaggaattgggggggagggtctcacattgcaggcgtttttcttggagtcggggatgccagcgcacagcatggaattttccagtaagtccttgtaaaccttcgtgcagtcctggggggagatgagcttgacatccacgcacatgaggtcagagggaaaggtcactgcagggaggagcagggagagctgtcagtcagagaggatgggggcgaggaccagaagggctgttgttcaggctcctggttccgagggaggagggtctggggcccaggactgctgggtctgagggaggaggggctggggtctggactcccgggtctgagggaggaggggctgggggcctggactcctgggtctgagggaggaggggctgaggcctggactcctgggtctgagggaggaggggctgggggcctggactcctgggtctgagggaggagggctggggcctgcactcctgggtcactgaggccacctaccatctgggctcgtggtagtgccccagccggagacagtacaggtggttccagggggttcgcagcgggagggcagcctgactttcttcaccatggatgacagcctggcctggctattgagcttcacgagcatgaggtcattaacatgggtctgtgtggagtagccggggtggcggaatgacttcgaggccttgatcctctgagctctcctgtcgcccagcgtatcactgcccaggtgcacggtgtactcactgcgaggagtgacattcacagattcagaagagacactgtgacagagagggtgtgcaaagacctgggggacggggtggggacagagacccagagagaggaggggggacagagacacagagagaggaggggagacagagacccagagagaggggaacagagatccagagagagagggggacagagccccagagagagggagacagagacccagagagggggggacagagacccagagagaggaggggggagagagacacagagataggaggggggacagagacacagagagaggaggggggagagagacacagagagaggagaggggacagagacccagagagaggggaacagagacccagagagagagggggacagagatccagagagagagggacagagacccagagagagagggacagagacccagagagaggggaacagagaccagagagagagggggacagagccccagagagaggaagacagagagccagggagagagggggacagagccccagggagagggggacagagatccagagagagaggagggggaacagagaccagagagagaggggaacagagacccagagagagagggacagagacccacagagagaggagggggaacagagaccagagagagagggtgacagagacccagagagagagggtgacagagacccagagagagagggacagagaccagagagagaggagggggaacagagaccagagagagagggggacagagacccagagagagagggacagagacccagaaagagaggagggggaacagagacccggagagagaaggggacagagacacagaggggaacagagatccagagagaaaggcagacagagacccagagagagggggacagagccccagggagagggggtacagaggcccagggagagggggacagagatccagagagagagggggacagagaccagagagagagggacagagacccagagagagaggagggggaacagagacctagagagaatgggggacagagacacagagagaggggaacagagatccagagagagggggacagagacccagagagagggagacagagagccagggagagagggggacagagccccagggagagggggtacagaggcccagagagaggaggacagagacccagagagaggagaatagagccgtaggcacagaaagactgcccttccacccccatagcgagctggagacgctggtgcacctccagcagagacttgggcggcacctacttcatcttgcagtgggcggcagtgagcacccagcgctcattgaccaggacgcctccgcagtggagctgattgccactgagcagggccacctgccatgggtgggagcctcttgcacatggggcgccatcaataatcttgtcaccctgggctggatggagacatggaggagcacgtgggtagctagcattaggggaaggctgaggctgcacctcagggattcccagagtcagagatggacagagacagatgaaaatgtgtggagaaatacagagaaagcaagagatagggatagagacagacagaaggagcccactcagaaacccaggaggcgcatctcatctggggaaccacagagagaccctgagcacaggaggcagggcctggaggggacagagaccccctgagtcagcagaagcaggaagagcgggggcttcagccgacagtctggtcctcccaggatggaagctgtttgaggagggaagggttctgactcagggactccttggagagggtcagtgggggccctgaggtgaggtcagacttcccagtccagctttcaccttcttctcctgcagtttccaaggctaaggatagcagtaagatctgcaggggcaggagaagggatcttgccatggtgccctgctgagccgctcaggggctgccaggcgaggaagggcctctcctgctggagctgagaaggagaaagcattcaggcccagcccctccccactcagacccaggggtccaggccccagcccctccccccacagacccaggagtccaggccccagcccctcctccctcagacccaggggtccaggccccagcccctcctccctcagacctaggggtccagaaccccagcccctcctccctcagacccagaaattcctttctctggcctctccttccttacactcagaagtccagacccctaacctcctcctccctcatacccaagagtccagaccctagcaccttcctccctcagacccaggagtccaggcccccagcccctcctccctcagacctaggagtccaggcccccagctcctcctccctcagacctaggagtccaggtccaagtccctcctccctcaggctcaggagtccaggccccaacccctcctccctcagacccaggagtccaggcccccagccccgcctccctcagacctaggagtccaggcccccagctcctcctccctcagacctaggagtccaggtccaagtccctcctccctcaggctcaggagtccaggccccaacccctcctccctcagacccaggagtccaggccccagcccctcctccctcagacccaggagtccaggcccccagctcctcctccctcagacccaggagtccaggtcccagtccctcctccctcagacctaggagtccaggtctcagtccctcctccctcaggcccaggagtccaggccccagcccctcctccctcagacccaggagtccaggccccagcccctcctccctcagacccaggagtccaggccccagcccctcctccctcagacccaggagtccaggccccagcccctcctccctcagacccaggagtccaggccccagcccctcctccctcagacccaggagtccaggccccagctcctcctccctcagacctaggagtccaggtcccagcccctcctccctcagacccaggagtccaggcccccagcccctcctccctcagacccaggagtcgagacccccagcccctcctccctcagacccaggagtccaggcccccaggccctcctccctcagacccaggagtccagaaccccagcccctcctccctcagacccaaaattcctgttcttcagatccctagagacccaggaatctaggctccgatcttgcccttccctgtggaacccaaacttctgactctgtagttcgtttttccctaaaaggccccaaattgcagacttccaggccctcactgctcaggaccgggagtctaggctgcagcccctacctctcgagagcagagtcaggcttggagccagcatcaccctctcccctacaggtgcacccttgatgaagcctcttctcacctcgagaggatctgatgtgatccaagttccgacttgggctggcacacagctgggctccaaaatcttcatccctctgctgggccgtcctcttatatcaccccccgccccatgcccggccccagcgccctggggtgcaggcggagccgactctgggacacccccgcctgcatttgcggttctggttatctggaaccctgacgcagcgagagcaattggcaccactgcactctctctccaccctccctccgaaggacgggcggtgcccagctcctgcgcccccgcacattctggtcccacagtccctcctggctgctctcgggggagggacccggtgcgctgggtctgaggggcaggagcgggattcaagcagtcgctgagctcagagaataggctctggctcgggtccttctctggggcggttttctttctttcttccctcctccctccctcccttcctttcttttttttggatggagtctctctctatcgccaggctggagtgcggtggcgcgatctcggctcactgccagctccgcctcccaggttcaagtgattctcctgcctcagcctcccgagtacctgggattacaggcacgcaccaccactcccagctaatttttgtatttttagtagagaccgggtttcactatgttggccagaatggtctcgatctcctgacctcatgatgtgcccgcctcggccccgcaaagtgctgggattacaggcgtgagccactgcgcccggcttctggggccattttcttgccctcaccccctctcaggggtggcctagaccctacatcctaattctggcccgcctgggggaacttgtccaagctgatcccagtcgtgcctgtaattacgcctgaacccattcccaactctaacagagaggtgtaagttaaaaacaacgctttccctaaccccaccccactaatatttgccatgtttaggatctatgttcttatggtcattttaatcatgttatacatagatttctttgtatattatgtatttataacaaaaatgtctgtacttaacattatctaatagaacatttttgagggcttcatttattaatttataagcaaatatttatttttctttttttaacttttcagttcgggggtacatgtgcaggatgtgcaggtttgttgcgtaggtgaacgtgcgccatgggggtttgttatacagattatttaatcacccaggtattaagcctagtacccattagttatttttttctgatcctctccttcctcccactctccaccctctcataagccccagtgtgtgtacccaaaggaatataaatcattctgtttaaagacacatggacacgtacgttcattgtagaactattgacaacagcaaacacagggaatcaacctaaatgtccatcagtgatagactggattaagaaaatgtggtacgtatacacaattgaatactacgtagccataaaaaagaacacgatcatgtcctttgtagggacgtgaatggagctggaggccattacccttacaaactaaagcaggaacagaaaaccagatatggcatgttcctacttacaagtggtagctaaatgatgagactgcatggacacatagaggagagaagaatctttcttatttttttttttttttgatggactctggctctgtcacccaggctggagtgcaatggcacgatctcggctcactgcaacctccactcccccgtgttcaagtgattctcctgcctcagagtcctgagtagctggattacaggcgtgcaccaccatgcccaactaatttttgtatttttagtagagatggggtttcaccatgttggtcaggctgctctccaactcctgacctcaggtgatccaccggcctcggcctcccaaagtactgcgattataggcctgagccaccgcgcccagccaaggatttttgctaaatgagtagattatagctgctcttgccacaggggaggaaaatgggtaactatgtgagatgatggacatgttcatttgttcagctatagtaatcattgtcctatgtatatacatcgcatatgatcatattgtacactttaaatatacacaataacatttattttttaaaaagaggaaaacttttccctctttgtacatttagattacttttccttcctttataatggttgtgtaatattccatactatacttgtatcatgatgcatgtcatctgcctcaaattgaaatacacttggatagttttaattataataatgctgagatgaacttctttgtacattcatctttgttcattgtagtcattcaaacagcatccattgagcatctactctgtgccagaaactattcaggctcttggagacacagcagtgataaaacagagaaaaatttctgtcttcatagaggtttttgttttgtactgtcaggtcagcacaaaaataagcaaataaaatgtagagtttgttaggtggttgtaagcgctataagggaaaatccaagcaaggaagagggttggggagttactgattccctctaccctcgaggatccctgaggttataatatcaggaaggttggctgcaaagaccccacgtgaaggtgatatttgagcaaagtcttgaaggagatggtggagggatccaggtggctgcttgaaggtagtgagttccaggcaaagcgagcaggcaggtgtgttagccaaggagcatatctgaagtgcctcagcagacaaatcactgcgaccaatacagagtgaccaaaggagatgagggcaggtgatgaggccagaaatataacaggactctgatgacatgcggtctgaaaggtctttggcttttattttgagtaagacaggaaccattgttggacacacttctaaagttggaattgacctcaacctctaaattatatccccaaaatgggatttatttctccaccctggacctaaaacttatctcaatcctgaccccaactcaattcttttttttgctttgttttgttttgtttttgtttttgagatggagttttgatcttattgcccaggctggagtgcagtggtgcgatctcagctcactgcaatctccgccttccaggttcaagcaattctcctgactcagcctcccgagtagctgggattacaggcatgtaccatcacacttggctaattttttttttttttttttttagtagagatggggtttctccatgtaggtcaggctggtccctaactcccgacctcaggtgatctgccttcctcagcctcccaaagtgctgggattacatgtgtgagccaccacgcctggcaccccaactcgattctacatttgacccataatagtagacattattgttgtgtccccaggcattcactccttctgcctttctatcagaggctccattttgtttggataatactttatcctcatcaggactataagcctcaatgaaccaagcattgaagccatatttcgtttgcttaattagttggaaaatggacatgtgctgttcttctggccaatgaggaggaggggaagaccactgaggcacttctaggaaagactttctcattttcaaaaagaggcactgaaaggggacttttttcttctgctagatggtgtcttttctggatgcaaattctggaactgtggcagcaccccagggaccacagagggaagtgaccagaggactaagtcaaaacactgcaggtagcccaccagagaggtgaggatcagctgggtctttgatgaagtcactgagctggtgaattaaccaacgatggagcctcttcatgtcatgatttttcagattccccttctgggttagagttgcttggtccttgtagccaaaatcatctttataagacctcaatgttcaatcagaatattgactcagatcccaaatctgatcccaagccacaaatccaaatccgattctaacttgattccatatcttgaagccacataaatcaacaaactcaaccatgcctccagtcttagctctcttcccaaccctcatccccatatcccatttcagcccatatcccattttggccattgttaatgtgaagatgaccaatttaatttttagaatagtcttttttaaaaaaacaaattagtaatttggatcctatagctgactacctctcatctaaatttaattttttcttagtttttcttctatacagtggatttcttattttttagggaaaagttgttgattgtttatgcaatagtttaacaccaatcctttatatatttaacaaatatggattgggtggtagctatctaccaatgaggatacaatggtgtgcaaacctagatagtgtctcttccctcaaggagctgatagtgtcatgtaaaagaaatacagtcaattcataaacaagtgtaaaattacaactacaaggcatgctctgaaagacaggtgcagggtattatgaaggcacttccagaggggttagacccaggaattgactatgagctgagatttgaaagaatattaaactagaagaaatcttctaggaactagaagtagactagaagaaatcttctagtaactagaaatagtaaactagaagaaaatttcttctggtaactagaagaaaatttcttctggtaactagaagaaaatgggaggagaatggggagtgtgttgtgtagagaaaagagcatgtgcaaaggcccaaggcattattgctggagctcggaggccagaggttaactgggaccagataatgacgagctctgtatgtcattgtgagtcttgctttatcctgtggataatgaagaactatttgaaccttagtcagagaaataacataacaagatttgtattttcaaaacatcaacctagctactgtatgaaggctggatttgggtgggatgtgaagatactgggcaaccatgggggaagtcattgttgttgtctagatgagggaagatggtgacttggatacaggtggttgaaaggtggagacgatgttaagtacatgggttcaaaatgcacttaggagagagaatcaacaagccttggtgatggattgaatgaaggttgtgttgaggtagtggaagatgttaagatttcaaagtctgttgctcgatggacagtgatgccattcattgagaagacatggtagatgtggtcaaatggttctgatatgacaagaaaagacctcagaccctgacttcaagcagaaccctaaatccaacctttactttgacacaactcccaacacgtattttgacataagccccagcctttttgtttgtttcaatagctttcggggtacaagtggcttttggttacatggatgtatcgtatagcagtgaagtctgagattttagtgcacccatcacccaagtagtgtatattgtacccaatatttatagtgttttatcccttatcctcttcataccctcccccttctgagtctccagtgtccattataccacttggtacccactgcttagctcccacttacacatgagaacgtaaggcatttggttttccattcctgagttacttcacttagaataatggcttccaactccatccaagttgcttcaaaagacattatttgattctttctatggttgagtagtattccgtggtgcatacacatcacattttctttatccactcatcagttgatgggcacttactttggttccatatctttgcaattgtgaattgtactgcgataaacatacgtgtgtatgtgtctttttgatatagtgacttcttttcctttgggtagatacccagtagtgggattgctggattgaattgtagatctacttttagttctttgagaaatcaccatactgttttccacagaggttgtactactttacattcccaccagcagtgtataagtgttcccttttcatcacatccatgccaacatctattgtttttttgactctttagtaagccccagtcttaaccccaaaccttaatctgtacccaatcctgaacctcaaattctgctttatccttgatgaaccccaatttgtatctcaaccaataacctaaatcttgactgagttcttgactccaaatatcaactcaggctaggatccagacctcaatcaaacttaaccctcctgacccttgaccttaaccctgaaccattagccataagccaaactcaaccttgacctgagcagtgaatgtcaccatagcctgagtatcaagcctgccacgggataattcagacattagtctccattcccatcatattctaggaagcccacattcatatcctcccccatgaacccattccctcacatccaacaccaattctaacactctcaccccatcccacccctattctcatcctcaacccaattgctacctaaaatcccattctcatttccatccccaattcttttcccagttccatttttatttctccagctcaccacacaactttgactcttcattttacaaaaactctaaaataaagtctgccaacgaatatcttgctaacattgatgctatactaactcaactcaagccgagtcccaaaatcttctgagacatttactgtcatcgaatccaaaatcagatccccgaacttggacatctagccctgcccattccacagcagcaatctggtcgtgaagggtgtcaacattcctgacctgggctcccaaatcaaggagaagcagactccagcccagttgacctcacagctccatgattcagcaatctgtatctttccttcctggcttctcaaagacagaaatggtagcaagacttccagtgtattatctactccctgcatcttcatccttagattctctcctccctcagtcctctgcctccttagtatctgttagaaagaggaaggagccaggctactctagagccctgttattcactcctaagtcaccaaaacgtctatcctctgcttttcatcatctatcattctgtaaattatattcctaattatttaacctgattttgttgccaaacactggtcatcacaagcagaggaaatgtgtgtggggttctttttttttttccagcaccccgcccagaccggagaacacaggaggtacttaaataaatactagtctgcaaacttctggcatccacaggtccacaggccttagattcagtcctgccttgatccctgagctgttccaccatgcagtgtgacagaaagaactagaaagaacttggactttcaacccagctttgaatcctggttgcccaccctgtgacttcgggtaagtgacttcatttttctgagtcagactttgcccctccccaaagtggaggagagcaaaacctatttaccgaggcaaatgagaggattaaataaaattatgaatggaaaattgatgggcacataacagccagtgaattaacatgagttccctcagcccatcacccacggaatgaagaagcagctcccattttcccccctacatttagtgtggtgtgtctgtattcctcacattggtccaggtgaggattgtcatccccattttacctttattttttgccgcctgccccatcatccccattttatagatgagaaaatggaggtttaaaaaaggctagatcacttgagcaaagtcacagagctgaggagtcagaagtgtcagaattcagccaggcgtggtggctaaagcctgtaatcccaacactttgggaggccgaagtggatggatcacttgaggtcaggagttcgagaccagcctggcaaacatggtgaaaccccatctctactaaaaatacaaaaaattagtcggatgtggtggcatgtgcctatactcccagctactcaggaggctgagacaggagaatcacttaagccagtaagcagaggttgcagtgagccgaggttgcaccactgcactccagcctgggtgacagggcaagactccatctcaggaaaaaaaaaaaaaaaaaagccagaatttgaacattgggattcaaaggcctatggtatcactactgcacaaatccatactctgagaaggaaatttccttgttacatccacatgtaccctctgagtctcatttggttcaaaacagacttggatcgccctcagcctattaatgatgcatacccccatgtcagagagaggcccatatccaggccccctgtgccctttgcatttagtcctggcacctgttgctaagtgtcatccagacacccagccccatacctccatcgtcctcagacctatgtcctgaacctttgttaaatgactcatcttccaccttatgatcacacctgagaactggcatctgataatcttgccagctatgcctttccctgagggattctgaacactgtgaccctcgtacctcctgactcagcccatgggttctgatggcccattgtttcatacttcctggattctcttcctccttatttctttctttctttcttttttttttttttttttttttttttttttttttgagacagagtctcactctgtcacccaggctggagttcagtggtgcgacctcagctcactgcaacctccaccttccggcagaaccccatttcttttgggggagatgctgccttatttcttatagttctggtgaaactgtcaatcgtagttctccaactccacccacccactgaggcggagaaatgacccaggccaagtcaacaagatcagtgttttctctctggcaacaatgatagattcaaggggtgggcccagttcaaactggaccaattagagttcctccctgggattaatatcaagatgccaggagaaaggagatttttgtttctgttagtagctgctatgttccctccatgcccctccttagtacctaagattgagtaaatcaatccccaagtcttttcaggcttatgttccactggagacattaaagtatctcctggaccagcctaggcaacatggtagagtcctagctctactgaaaaaaaaaaaaaaatggctgggcgtggtggcacatgcctgtggtcccagctactcaggaggctgaggtgggaggatggctgaaacccaggaggtagaaactgccttaagcattgtttgtgcaatgctcactgtactgtaacctgggtgacagagtaagaccttgtctcaaaaaggaaaaaaatctccttggcattggatgatactaagaaagtatcaactgtgtaaggtgtgataatgtaagttggttatgtttaaaacgagtctcttttggaacaaggattggcaaatttttaaaataaagggccagagagtaaatattttagcttatgtggaccaagagagaaaaatggaagatattatgtagatatttaatagcaggaaagaaaataaaatttcacaatttttaattgatgaaattcaaaatgtagtaatgataatttagtacaaattttttgttgctattccttatcaagctcacgcctgtaatcccagcacttttggaggtggaggcaggcagatcacttgaggtcgggagttcaagaccagcctgaccaacatagagaaaccttgtctctactgaaaatacaaaaaattttagccgggcgtgatggtgcatgcttgtaatcccagctactcaggagactgaagcaggagaattgcttgagccagggaggcggaggttgcggtgagccgagatcacgccattgcactccagcctgggcaacaagagcgaaactccatctcaaaaaaaaaaaaaaaaaaaaaaaatttagctcaggagatttggtccaacagctgtaatttgccatcccctgttttaaaaatgcataataaaatatttaagaatgagatgttgtggtgactgagattgcttcaaaatattctggcattagggaagtgtgtggtgggagtataggtgaaacaataattggttttgcattaactttttttttgagatagggtctcactctgttacccaggctggagtgcagtggtacaatcatagctcattgcagtctcaacctctcaggctcaagtgatcctcccacctcagcctcctgagtagctgggaccacagacgcatgccaccatgcccagctaattttttaatcttttgtagagaccagtctccctatgttgcccagactggtcttgaatgcctgggctcaagcaatcctcgtgcctcggcctttcaaagtgctggggttacaggcgtgagccactgcaccggaccttgcattcattatcgaagttggatggtggtatatgaagacacattatgttattctattttgcatgtgtttgaaattttccataataaaaattataaaacaattctttgagttgagatgtcccccccagaaatgcatccctggcatcagaagtttaatgccatgcttgaaagacttcctcaggatttctggtatgggggaactgtcataaagcatcagggagattgatgaatgcaaggtatctcacacacccacgccccttgtggagaattgccttcccatagcactaagtggccatgtttcatatcacatgactccaagtagccactgattggctaagatttggtcacctgactgggatgccatcaaatgattggccattcagtgaccaatgatgtggctgaagaagaaaaggtgagctagatgaatcagattctctttcatgagactattttctaaagatcctagtgaaggaggaggcggggtttaactctggactagattgaagacagctggaacagggaaaaggcaccaaaagcacatctccataagacgtgcacaccagcaccatgacagtttgccactgccatgacaacacccaaaatttatcagcccttttctagaaatttctgaataacccaccccttaatttgcatgtaattgaaaatgggactaaatatgactacagaactggccctgagctgctactttgtgctcaatgcctatggggtagccctgctctgcaaagagcagtacctctgctactgtgcagtactgtttcaagaaaagtcactaacaccactgggttgcccttgaattatttcctggacaaagccaggaaccctccctggctaagctccagttttgggcccacctggcctgcaccactagaagagtgactatatccttgtaataactaccccctccacactcatctttccctaaaacaagttatgttaagcctttgctttaatgaaaactttcccaaatgccctttgcgtcacacttcaatttggacacaccactcatttccttctaccacagcagacaccaccagatggctctaggctgtgagaaagagttctatctggatttttgggagctctcaagatttttgacccgagtggtggtttcatggttgttcatttgtgaatatttaagctgttcatatattttctgcactcttttctatgcatatctcccaatgttttcccttttcttctttttttctttttttttaaataaaaatagagatgaggtcttacattgttgcccaggctggtcttgaactcctgggctcaagtgatcctcccacctcagcctgtgaaagtgctggaattacaagcatgagccaccatacctggcacaattattattattaatttatttgtttatttattttgagaccgagtcttgctcttgtcacccaggctggagtacaatggcatgatccctggctcactgcaacctccgcctcctgggttcaagcgattcttctgcctcagcctcctgagtagctgagtttacagatgcccaccaccacaccctgctaatttttgtatttttagtagagacggggttttgccatgttggccaggctggtctcgaactcctaaccgcaggtgatccatccgcttcggcctcccaaagtgctgaaattacaggcttgagccaccgcacctggccaattattttttaaagggggaaaattttatctccaaagcttgtaaatgctttgctcaggaaaactaaacacaaactctttcaaaactgtctttcacataccagcccactgaatgtttgaagacctttgtatgtattttctcccctgaaataaagctcttacccaagttcttccagaaaacgagggatcactttaggcagtggtgatggccaaagtgaccatgagaacttggtttctgcacatccccacctagtctgccagcaggaacaatcccggatccccatccagccctccccacagggccaaaacagagacaggcaaggaaccagagagttgtgagtttattaagggagatctagtgcttatcctagaatcagcccttgctgcctatgatcttcttgatccagtccaggtagcggcagatgttggtatagacgccaggtttgtcggacctcccacaggggtctgagccccaggatgtgatgccctggagtgcaccatcacacaccagggggcctccagaatcgccctagacagggagaatgagaacagccttgcatctgagatgtccacaacgtcccttttcctgctgtcccagcgttttaccagttctttggcatgattggtcccctgtagccaatgggggtaaaagcattgtcccctgagaccagtcaggacagggcttggggcttccatgtacagacagacatggtgtctaagggtagtggtcaaaacactgacagaagaggggaaagaatgaaatcccagacaggcttggtggctcacacctgcaatcccggcactttgggaggccgaggcggtagatcacttgaagtcaggcgttccagaccagcctggccaacatggtgaatccctgtctctactaaaaatacaaaaactagctgggtgtggtggtgcacacctgtaatcacagctactcgggaggctgaggtgggagaattgcttgaactgggaggcagaggctgcagtgagccaagattgtgccactgcattccagcttgggggacagagcgagaccctgtctcaaaaaaaaaaaaaaaagagttctcgagggtccaatccagggagaagacagtagggattacttggagaggactgagctgaagtttcctctgttcctggccaatagtgaaggcatcattgattgcagttgccaaacataggagaaaggatcaagattcttatggacacacacacacacacacacacacacacacacacacacacacacaccatatccccaagagaccatggctgaaatatttgtggaagagaccactatctctacagaacaatccagagactggctttcatggcagtatcgctgatggaaacgactccatttttggccaatggggaagaaagcattgtatttagggaccagtcattggcaaaggtggtggggcttccaggaagtggacaaagccaggggaaagtgctaggaacaacgaagttgcagttagaagagagagttatatctatgacaaatcccaagagaaagggattggagctcattgaggaagcactgaagtcaatggcaccatttactccagccaactgggaagacaccattgtctcccaaggaaccaatcacaggagaagggaaccagccttgggattctagcccggtctcaaagaaaagtggctgaccaccgggccggtggtaaagtcggcacaaattccacgatgtaatgctgggaaccagagagcaggcaactcgtctaaactctagcctcagactctctccttgctggacatctaccccaccctctatagcccccaactctgcatcccatcctgtagttaagcgttcgaaagaaaacagcagcagcaattcaatgctcctaatccctatgcagtgtgactttcagagagagagtttggcttctctgaacctggctcccaatccgtagagataggggtgaacactccgggtgccaagtctttggggtcactcccttaccacccccacccccatccaagccttgaacctcgagagggcaatgagggatgtgtgaggagaaggatttcagaaattgctcacctggcacgtgtcagcccctttgctgctgcctgcacagaccatgccatctgtgatctgccccgggtaagcatcctcacacttcttctggggaaagatttttacttctgcacagttgagagtgtcaggaaaattctctgagggggaagaggttgtaaggttccctgagagagcagccctttgcctccatccctgtctggatctaaccccctttctttccaggatgtaatgggggagttttccagctgcatgggggaattttctgacactgtgcacaggggacatcacttctcaccacattaaacgaagctgtacttgttgctattgggctttctccatctagagaggggcccttggatctcacgtgttttttcttaccctgagccattttcaaatcaaggggctgggggttacttggaggtgcccctttatgatacctctgaccctctctttccagtcttcctgccctcagacaaccgggtcctcaatctgtgctaaatcctgctccttccaagtgtcacctcctcctggaagccttccctgaccactcgaattaaaaaataccatccctccattactccctatccttttacgctccacaatatttccttacagcactttgcctaatgttttattttatgtgtatttgtttattgtctatttctcccacctagcttgcaactccataacgacaaggactttgtacagtttgctcatggctgtatatccagcgcctgcaacagcacctcaggcatactaggtgctcagtaaataagagttgaattaatgattgaaggtggaattgatcttttttattaacctcttttgaggaatagacttctccaaagcctctttgagggggaaaaacttccatctggcatctctacgtgccaaaagcaatatgctcataatctcatttaatcctcacaacagcgctttgaaggagagatgcattcattcatttcattatttattcatcaggtcatccattcaacaaatatttattgagcatctaccatgtagcaggcaccattctgagcactaggagaacacaatgaagaaaactgatgtaacctgaaccctcacgtagctaaaaaatctattggttaatgattcccattttgcagataaggaaagtgaggctcagagatggaaaggaatttgcccagggagaaagggcagagccatagtttgaactgatctacttgatttgcgagcacgtgtgtttccacagccgcaaactgtctcatccaaagcattcagagcaggagtgaggcaggcagggacctgaatgctgactttgccacttcctggagaagctccttgactctcttaggtgagtcccaatgttttcactgtgaaggaaggcgaggggctctctggattctggagtcccaaagggacagcttcattggaggtccagattttggggtccagagtcaagagggagctaggactgctgggtcctgggagaagaagggcctagactcccgggtctgagggaagaggtgaccagggcccaggtttcctgggttcaagaaggagaaaaaggccaggggcggtggctcatgcttgtaatcccagcactttggtaggccgaggcgggcagatcacttgaggtcaggagttcgagaccagcctggtcaacatggcgaaaccctgtctctacaacaaatacaaaaattagctcgcgtggtggcgggtgcctgtaatcccagctactcgggaggctgaggttcgagaatcgcttaaacccaggaggcagagattgtagtgagctgagattgtgccactgcactccagcctgggcgattgagtgaaactgtgtccccctgcaaaaaaaaaaaaaaaaaaaaaaaaaaaaaaaaaaaaaaaaaggagggaggtgggggagaaggtgcttaggagcctgttttcctgggcctctgagaagtccaaatatcccaagtgtgttaagattatataaaatcctatacaaccaaaggtcccatagggtagtgctctccgccatacaggatgggcttttctggccctgcttaacaatctgctagttggttctttctctcaccactcttgttagtagtcagatcttcgaggcttctcatatgactcctgcttgtgaatctcaacatcatgatcactttcccttctttgtctccctctgggggaccaagctttgccaatagcttgggttccactgggccaaccagctcctcctctccctcccattagtggacaagcccactacctcggggactggtgacagtgccccagcctgagacggtgcacttctggccaggctgggtgcaatgatctgccaggctgatgggcttcactttggaccccagggatgcctggtcacgcagttgaagaagcatcagatcatggttgtggtcctccacatcgctgctgttgtagcaggggtgtgggatggactgaaccacaggtatttcttgctctgggccatctttattctgtaggctgtggtctcccaggcgtactgtgtatttcctgtaatggtggggatagtttgggacccaggcaggggtattgcccccagccccctcctccttcagacccaggagtccagtcctcagctctctccttcctgagtcgaaaccccagccccctctttccttaagccccagctgacctctgcccccatcatccactcacggttttttacagtgggcagctgtaaggacccagttgccacctacaaggacaccgccacagagtagttgctggccctggaacaaggccgcctgccaaggctgcgaatggggttggcactcatgaccccccagcaccttgtcctcctgtgccctggagtgtcctgcagcaggagggagagggttggatcgccaccctctggggcagtgcgagggctgggaaggccactgtgggttcaaatggacacacggcaagttctccgcatacaacttagtgaggaggtccaggcttccacacgctgccacacggggacactcatttcagtccatgtgtcatcatacaagagtcacacacccaagaatgcccccacatgcttccacatgagtctacaggccccgagtactcccaggtgaatctatgcccccaagcaagcagcccccaaaggctgtagctattcagacaatttacagcatcacggaacctactcctacctgctgctacctgtttcttgcctctgtccaccctgaggaaagcccacagaggctcctgcaccgtatcgcactcttcacatccgtgcacacgcacccacataacccccgcggcattcccacagactccccagcgccactgctgccttcagatccctcccctccggaggcctccgcaaccctcctcacctgcccaggctccccccagcaagagcaggaacatccacgtcttggccgcacgaggtcgggggcgtcccatggtgaggtctgggaaatggagagggcggggccggtaaacaggaaggaggagcctgagctcccagttctggatttgggcactggggaggcagccgagagtatctggggctgttctgggcttctctggaggaaggaggaggctgggggactggattcctacattccaagggaggggggagtcctcgatgtctgggtctgaggggacagggagctgggagctgggactcctaaattagggagaggaggaagccggggtccagactgctggatctcgacagagaagggcatctgaggctggggtcctggaatctggagaaggagggtccggggcctgatgtctgtatctgagtacctctgcacctcaccttccagaatccaggggcggggtcacctactgattcggacccagtggaggaggccccagtacttcagttctctgcctggtacacgattctggagccttttaactgggaatctccacctcctgctcctcctccttctcctcctgcactagagcctggggagcttctgggaactggaacactgggtgtgagtgagaaggggcggaggggattgaacgtgaaatcttgagggaggaggggctggaatctcagactcctgaggctagggagaggagggactcggtgctgagactctacgatctgaaacataaagggctgggggccaagattttagttctgagaggggaggaggctgggggcctggattcctgggtctgagggaggagaggctgggggcctggactcctaaatctaagggaggagggactgggacctgggatttaggtctgaccgaggaggggctgggggcccagactcctgggtctgagggaggagggggctgctaggggccaggactcctgggtctgagggaggaggggctaggggcctggattcctgggtgtgagggaggagagagctgggggctgaattctaagtacttttaaaaggagaagcttggaacctgatcttttgtgggaggagggggctgctgccagtaaccgggaaccgaagaaaggcaggtcttctagggtcagaaaccagagggtggatcaggccccgcccgctgtcccctgagaggtccgggatctgggagggcaggtttgggaggcactgtgacctggtttccccttcccctggaggcggcaagaccaacccaagcagaacccaggagtcttgctgcaatagggctgatggacagagactttaggcaaaacttactaggggtttaagggggagttgcaaggcggtaccggttccctcatctgcccttcaccgcccacccgtttgctctccactcatctcacagctcaggcagaaagaaggtgaggtttcccgcgtttactgaaaaatcatccgttgcattggctctaaaggtatccagaccctccctcaatttccccccaggtctccgccaggattcaaacccagcacacgcccaggacggggccacaaggggctgagctctacaccgcccgagctccacgtgggcggagctactgcgcccctgacatcacgaggggcgagatctctggtgaaggaggcggggccacaaggggtggagtcccgaggggaagtcccactgggcaaagttccgaggggcggagctattttgtgtaagtggttccttggggcggagccacaggctgtgctgttccaagaaggaggtgatggctgtcggtgacgtcatagagacgggctctgaagggcgtgtccctgctccgttccgagggggcgcgactgtgtcttgcttgacctcgtgagggggcggagcctcaggggcggagtcttagtgtccagaggggagtcagggcagctggaggtccagggcgggaaccattgaggctgggaccctacgagaaccccctaccccgtgcccttcggcctctcttggtcttccaaggtgcccccgtggcgcgcgggctcagttctccatgatttcttggatccagtcaaggtagtggcatacgctggtgtagactgcggggcgccggggtctggagcagggctcagcacccccagacaccacgcctgccaaggttccattgcaaaccagggggcccccagagtcaccctgtacgcgagagaagggcagaggaactgttaggccactctgttcatgacaattacacgggccacttcctccctcccagaaaggccccagccccttcctcctccaacatccgagagtcctccatctccagcctcttcttcctcagacccaggagtaaaagctcagagggcccacctccccgcaggacctaacctcctcctccccgaggactcagactctggacgcccagcccactcctcctgtagatccagaagtctggacctccagaccttttctcttttacactaaggagtccaggccctggtcccgtcctctcccaggaaccaggtatcccagtctccttctcattttgacccaggaaggctgggggccgacccctctgctcccctaaatcctagaaaacttggcaggacagcctcattttccccagagtaaggtctcacctggcaggaacctcggcccccctcccacaggcccgcacagagcatgctgtccgagatgtgtccagggtatgcccagtgacagagtttgttctccaggatgctgatgttggcacactgcagtgtgactggaaacagcgctgtcagggaagagaactgtcaaggatctgcaactgtctccaacacactcagcaccccactgccctgagtcctccctgcagcttttccaaaggaccaatggagccacatttaggactctcaaagatagagacaagagacagtgacagacagacagtcatagcacacaagagaaacaaatggagacaaggaggaagagggccaagtagagagagaggctggccgggcaccgtggctcatgcctgtaatcccagtgttttggaggccgaggccggcggatcgcttgaggtcaggagtttgagaccagcccagccaacatggtgaaaccccatctctgctaaatatacaaaaattagccaggcatggtggcaggcgcctgtaatcccagctactcgggaggctgaggcacgagaatcacttgaacctgggaggtggaggttgcagtgagccgagactggtcactgcactccagcctgggagacagagcaagactccgtctcaaaaaaaaaaaaaaaaaaaaaaaaaaaaaaaaaaaaaagaaaggaaggaagagaaacagaaagatgcatgcagagagccaagagataagaggagatgcatatataactccctagcactttgggaggctgaggcgggcggatcacaaggtcaagagattgagaccatcctggccaacatggtgaaactccgtctctactgaaaatacaaaaaatcagctgggcatgctgttgcacacctgtagtcccagctactcgggaggctgaggcaggaggatcacttaaaacccaggaggtggaggttgcagtgagccgagatcacaccactgcactccagcctgggcaacaagagcaagactcagtctcttaaaaaaaaaaaaaaaagaaatagaaaaagacccagacctcaaggggtggaatgaaggcagtgagataaaaggaaagagatttgcaggaagatggtcactgatggagacagagacatagacagagataccagatacagtgtagtcagtatagatgtggatatggatatataatacacatgtgcatctatataagacatgggtgcaggctccgatgcatcaagggatatgataaacagaattggtaaacagaagtcggggacgggggctgtgcagggagacaggagccatttgggtccattggagtgaatcagagaacttatcttggctgaagggggcagcctccattgactcagcccaatgcttgctattttgggaatgtgagttcttcaaactttttcaggtgaatccagaaacctggcttttgtataaaactttccaagttttagatattggcagcaacaaattcagactgtttttccaatccactgacccaatttggctaatgggtcagtgatccgtgactctgagagacatggtcttattcccattctaagatgaacgcatttcacatttaaacatctctgggccaggtacagtggctcacacttgtaatctcagcactttgggaggccaggagtttgagactagcctggacaacatagcaagacctcatctttgctaaaaataataaaaatttttagcataaggcttaagttaaaggaggtcccatcatggagcaatgcatgatgggaaattcccacccagcatcttttaccagaatcagtgctttattcatggagggaagaaaattggaacagtatggatggtcacttttcagaggcaatggagagaggattcctgcatcaggtggattccaggatactattagaatgcccagaatctaagattctagaattctcagattctgacacactagtatccatgattctagaatctagaggctcaacgtttagagttttatgaatccaagattctaacattccagattcccctggatcaaaaaactccaggattctaacattatctgaattaaatctaagatatgactagatttaaaaaagactagaattttggctgggtgcagtggctcatgcctgttttcccagcactttgggagtccaaggcgggcagatcaccaggtcaggaatttgagaccagcctggccaatatggtgaaacctctgtctctactaaaaatacaaaaaaaaagataataataataataataataaataataaaaaaatgaccccggtgtgggatgtggtggtgcatatctgtaatcccagctacttgggaggttgaggcgagaggatcacttgagcccaggagttcaaagctgcaatgagccgtgatcacaccgctgcactccagcctgagcaacaaagcgagaccctgtctcaaaaacaaacaaacaaacaaacaaacaaacactctgaaattagaatgtgtcttccagaaaatggtgttatataatcaatgggatctaatgggatctttcctcctcctcctttttttcttctcctcctcctccttcttccacttcttcgcagttcatgaaataatggcacatcttaaaaatgctagcatcttatatttggttaaatatatcgattggcagatagatagactgacagagagagagaggagagagaaaaggagaagacagagatgaaaaggcagagacagaggggtgagggagcaagtttcagagagagttctgggccaggtcatacccttggggctggacacggccccccagcctgagatgagacactgcatgcctggggagacacaggtctggctgaggttgaggggctgcacagcaggactcagacgtgcctgcctgggcaggcggatcagcatgatgtcatcattgtggtcattggcgctgaggtccttgttgaagccagggtgggggaagaagtccgtaacccggaacagctgctccggaccctcccatttccagaggtggtgctctccaaggcggacccacagatacctgctgggacaggcctcagaggtcaagctgggggaaaggtaaaagtcctttcagccccagccctcttttcctgtccatcagggtgctgtgtgaccctctgcaagccacacaccctctctgcaccctcatcatctatgtctggcccagggtactgtgattttaagcgaggcacacacctcctctgggtccctggtccccactctgatgttttgtgtgtctccatctttgtagctctccccacaaagcccccgctcctagtcccaggctgagtgagccaccttcctccctactcacctggagccttggtggtgacttgggtccctaggaacggtgtgggcacgggggaccccacctaccacataacaaccgccccacccctgcccccacaggtctggtggcttctgtgggagcggctctgtatgtctaagtggtgtgtgtgtatacgtgtgcgtgtgtatgaaaggggatgggatatggaaaatccccaaattgggggtcatctctggcctcagcttttcctgtctatcatatccttcacccttcaatgcatgtcttcctggtgtctaaccttaagccctcaccacagtctcagcgcacttgtttcatttctggtccatgccctagacagctgggatcctttcggggatgacaagtccattccccagcctctgacctctgacattaggcagcaggctaatgactgcgaattcagggttggggaaccagaaacatctgtgtctgtctctctctgtcattcttgctgtcttggctctggatctggaaaagtagtcctcacccctacatcccttcatccccctacccttcccctgcctctcactctcttccaccttcatatctctgcatttctcctgcttcactttcggctgaaatctgaacatcgttctcccagtctgatgtataggcttaagttaaaggaggttccatcatggagcaatgcatgatgggaaattcccacacagcatctcttaccacaatcagtgctttactcatggagggaagaaaattggaacagtatggatggtcacttttcagaggcaatggagagaggattcctgcatcaggtggattccaggatactattagaatgcccagaacctaagattctagaattctcagattccgacacactattatccatgattctagaatctagaggctcaaggtttagagttttatgaatccaagattctaacattccagattcccctggatcaaaaaaactccaggattctaacattatctgaattaaatctaagatttgaacatagaattttaatgttctaggacaaaaagactagaattttggctgggcgcggtggctcacgcctgtaatcccagcactttgggaggccgaggcgggcagatcacaaggtcaggagttcaagaccagcctggccaatatggtgaaacccccgtctctactaaaaaaaaaaaaaaaaaaaaaatagcctggcatggtggtgcatacctgtaatcccagctactcaggaggctgaggcaggagaattgcttgaacccgagaggcagaggttgcagtgagctgagattgtgccactgcactccagcctgggagatagagggagactctgtctcaaaaaaaaaaaaaaaaaaaaaaaagaaagactagaatgtcatcattctataaatctataaccttagaaatttaagagtctgggattcaaatagtttaagactacagaattatctgaatctcaatattctaggatactgtgaatcaaagattctagtactgtgagtttcaatattcaatgaatctagaaagctctgaatttaagattctaggatcacactagccattatggctattgaacacttgaaatgtggctagtccattttgtaacaggctatgtgtgtaaaatacagaacagatttcaaaggcttagtaccaaaacaaaagtaaactgtatcgttcatacgtatttaaaaattgattacatgtcaaaataagtttttgggtatgtcaagttaaatctattagaattaattttactcattccttattttttaaatgtgtccaccagaaatttaaacttacacatgtggctggcatcataattcctctgggcagtgctgacccagactgctaagattctaatagtctgcgaatctatgattctaaaatttgctgaggctattgcagaatttcataaattcaagattttaggattctacgattctggatttctctgggtcagtctcggattcgaagagcctaagtttcgaatcttagacttctcaaatgagatattgctggtctctagaattttaggatttgggaggctacccttcctacttctaagagttgaacttgtggtatcagaagtggaggctccgcacttctggcctaaagcacccctcaccctctcctgacccccagcctctgtccctccccagcatggccagcctgggtcactcacggcttgcggcagtgggcagctgtgagcagccagcggtcactgatgagggtcgccccacagaagagccgagtaaggtggaagaggccggcctgccaaggctgggagttggggcgacattcctcggccccgatggcacgggtgtctgcccagccatgccctggggtggggatgagggacaaaggggtcagcgaagagcaggctgggagggcagggagaggatgctgagaagcctagagggcaggaggcagaagcctgggatgggagggaagagcaaggtgaccttagtacagccgtgaaggggcagccagcctgggagcctcacctgccagcagagagagcagagcacagaggagtcccagcttcatgacccctgggcacctggatcctggaacgtgcacccggcgtccagtgcttctttatggtaagccatgccatctccttcctcctccatggggccgcccctgtgattaatcggggttgggaaatgtacctgggggagggggaagccctggggctgtgacaggggccttgggagaggaggtaagtgcagggggaccccccttttgggatgaactggcggcttgctgggccagagcttgactgaatggaggaggagtgctgggggtgtggagaggttgtgggcacctcctctggggtcttcagagtgggagacctcattcctcatcaccttaggctacaagatacagaatcttttgtgtcctggaaaaggagggagatccttgaagcctaaggtcctggggtgcagcaggtttattttggataaagcagtggtgtgcagagaccaacctcccacggcaggctggagggatgtgcagggggaccacccagaaaggaggcgaggggtggaagacagagtcaggactcagacacaagagcaaaagatacaaagagagggaggtacaggcacagaaggacccaagatgagaggaggagtgggaggaggagacagaacacgggaaagattgagggaaatccaggtggagtgaggcagagaccacaggcagctgcacaggtttacacaccttgcagaaccttccctgccctggggatttgggcctcttcccacaaggacaaggccctctcctagaatgttgagaaatctggttccatctggattaacccactcttgtcataacctgcccccttccccacggctccaccacccaaggacccaggtgcccaaccttccaggtagcaagtgccctgtgctctctcttaatacatcctgatctttgccaaatcctgagaacatttgctatatatttttttcatccatctccctgccccccaccccattgtcccttccatcaccccatcctccctgcctctctcctcatcattccttctcaccaggtggacagcttctggagggctgggcccaggtctgactcatctctgtgtcccagcatcaccccgttccaggcggaacagggcttgcagaagtcctcaggagatgttcattgaatgagtgaatgtctttctccatatccttcttttcctggtgaactcccactcatccttcaacacccaacctcaattctccctcctccaggaaatctctgagatcctcaggcagagtccatctttgcctcccctgggcacttacgatcccttccactttctcctgctcacaggcctggttatgaagctgggtctgggctccccttgaatgttctctcactgtgtcgtcatggtttggagcatggactctggaactgaaccatgtgtgtccaaatctcaatgattaggtgtgattagtgatgaggtgtgtgactttgggcaagtcacaagacctctctcagttgctccatctgttttttgtttgtttgtttgtttgtttgttttccaaaacggagtattgctctgacacccaggctgaagtacagtggcgcgatctcagctcactgcaacctctgcctcctgggttcaagcaattctcctgcctcgacctcccaagtagctgggactaaaggcgtgcgccaagacacctggctaatttctgtacttttagtagagacggggtttcaccatgttggccagtctggtctccaactcttgacttcgtgatccgcctgcctcagcctcccaaagtgctgggattacaggcgtgagccaccgcacctggcctgctccatctgttaagtagcagtaataacgagggtcgttggggggattaagcaaatttacacacatgaagcacaacagtgtctgacacatggtaaatgttcaatgtctcttcatcccctgcagaaacctgtggtgcctttatcatagctcatttcacccttgcctgcagttgtctcactccctttccagacagggaagtccttgagatcagggactgggtatccactatgtgctaagtgccaccttaactgctattaagagcattttagaccaagcgcggtggctcacgcctgtaatctcagcactttgggggaccgaggtgggtggatcacttgaggtcaggagttcaagaccagcctggccaacatggtgaaactctgactctattaaaaacacaaaaattagccaggcatggtggcgggcggcctgtaatcccagctactcgggaggctgaggcaggagaattgcttgaacccgggaggcagaggttgcagtgagcctagatcgtgccactgcactccagcctgggcaacagagcaagactctcaaaagaaaaataaaaaaaaaatgagcattttaatagctacctttattgactgtgttctcagtgcctggtgttaggtgaactttgcatgtatattatctcatttaattatccttttgttgttgttgttttttgttttttgacacagggtctctgttgccaaggctggagtgcagcggcatgatcatagttcattgcagcctcaacctcctggactcaagtattcctcctgcctcagcctcctgagtagctaggactacaaggtgtgcaccaccatgcaaggctaattttttttttttttttttttttttttttagtagagacgaggtttcactatgttgctcaggctgatcttaaactcctgagctcaagcattccacccatctcagcctcctaaagttctgggattataggagtgagccactgcgcccagcctatctcatttaactctcacgggagtctaattaagcaggtgtctccatttcacagagtgaaaactgaggaagagacagcattcaagtaatttgctcaaagtcatacagcaaagtgattgaaatgcatttccttctctacctggtgaactcctacttatcctttaaactcctgcacaaatgtcccctcattgagaagcctttcctgactccttcaggcacagcctgtggacttggtgtggtgcaccccatacccccttctgttacagcactgatctatttgtgttatgtgttcacacagcaacgggggtgacttctgtgtgccgggcacaatacaggagcttagaaaatcacagtgaacaaatatctgaatcactgccctcacggaatttgtggggaagggtgacatagaccattatcaagtaaacacaaatgagataatttcaggtataataggtgctattaaaaaaaaaaacaaacaaacaaaaaacagagcatcgggactggatgaccaaaagtggactcctatagcctgggcaattcaggaaggcctcccggaggaggtgacttttgagtggagacctgaatgacaggaatgtaagactggcctgtctccctgacctaactagcagctccttgagggtagtgcctggtctgattcatctttgaggcctggcataagacgtggctcgataaacattgtggagtgactaaagggacgggtgagttgcctttaataatgaatcgagttttcaagtttccaccgacctcgcttctggtctttggatgacaaacccagctgatacgcctgtctgacatttcctgcgtgtgctaatgggggcagaatgggaaagaggccacggaagggagctgtgtgctcagaccttgtacatcaacctcctgtgggctctgcagggtgggggaccttgtgatcacccctacgtatgtccccagcacccagcactgggcctggcacataatagatgctccataaattggtaactgaaaggacaaacaaacaaacaaaaaccccgtgcttaatgggaaatttctgttgtgcctatattcagctagcttatgttactgcttcaaagttcaggataagctgagacactcaaacttcttctttttttgagatggagttttgctcttttgtccaggctggatggagtgcaatggtgcaatcttggctcactgcaacctctgccccccgggttcaagtgattcttctgcctcagcctcccaagtagatgggattataggtgcctgccaccatgcctggctagtttttgtattttcagtagagatgggatttcaccattttggccagactggtctcgaacacctgacctcagatgatctgctttcctcggcctcccaaagtgctaggattacaggcgtgagccaccacacccagcggacactgaagcttctattagccttacctggattctgtgtattaactccccttccctcccccaatttcagggagaatcaaacaattcctcctcccaagttttcaggacgaaaatctcacagccaattaataacagacaaaccaaagattttcccctaaatgtcagagggaggtttcttggcacaagctgggcagttgaggtggcaagggtttcccaatcttcactaccccctcggccctctggtcttagaggctgggatagaagcaaggtgaggtcccttgagttcagtggcctcatgaaggcagagaaggtgctaatgactcagggccagcctagctcggaggaactggtgttgggtggaaccagaagtgggaaacagtgggagatgagaaggaagtggttaaaaggtgtttcctgggacttggaactagggtgaggaaaatgattcttccatcatccctaagggttggggatggaaggttgggactgggggctaccctgtgcacttcttccctggacacacgctttcaccgggacgtggtcagatcacgacaacaggtaacctttagtcagaactcaccacccactgtgttaagccttacatgacaatcaccatgaagatttacatacacatgttatatcatagtctcctcacaacatgtctaagaggtaggcacgtcattgttcccattttgcagatgaggaaactgaggttcagagagggcacttggcttgcccaaagtcacacagcagggagtggcagaggaagtcaggttgggtgaccccagtaactgctctcagaggctgggtgatgaccggcttcctggcttctctggaataaacctttgccaccacttcctgcatttcagcttcagtacaggcagagaatggggataggtgggggaatgaggtgagaggggagatgtttagaggtgtggagggcggcagaggtttgaacagtgcagacaaggggagagttcagccgactggggaggaagaggatggacgatggagcctctgggcatctggatcagcaggagcataacatctggatcagctggagcgtagcatctggatcagttggagcgtatgactttattgatccaggacatgtatttgcagatctgggtgtagacagctggatgctgggcagagccacaggggtaaacaccccacgagaggatgccttggagggtctcgtcacagaccagggggcctccagagtcactctgggggtggcaggaaggagagatcaaataaatgtgccaacgtgagagctgtcactttgggatctggggcagtggtggggaaggaaggagttgggttgggataaagacgaggatgggatggggttggaattaggtatgagctggaaggtaggaatggaggtggacttcaggttatgggaggttgggctgggggatgagaatgaaggcacagtgagactggggttgggattgtagttcatggaaggtgaggggatgaaaatgggcttggagatgggaatggggtggggttgggatggaaatgggattgaggatagggatgaggagggggttaggtctgggtaagagttggggtcaaggatgggtttgggaatggagttggggatcgggcacagggtctgctcttttcccataacctccctgtcctccctcccaggagtcagagactctccctgttcagaccctacctggcaagggtcctggccccggtccagtccagcacatatcatgttgttggtgaccacgccagggtagaagacctcacactctttagggctcaggatagtgatgctggagcaggtcaggcccttgttgtacttcactgaagggagaatatgccagtaatccctgggtccagcccccaatccttggggagccaggagtccagatacaagaccgtttctatcctaagccccagcccctcctccttcagactcaagaatcctggccccagcccctccccacttagacccaggagtccaggcccccagcccctcctcccctcagactcacagacccaggcatctaggaccccagcccgtcctccctcagatccaggaatccagtccccagcccatccttcctcagacccaggggttcaggccctcagccccctcctcctgaggttccggcctcagagccccagctcttgcctctccgggcggccgtggtgccccagccagcaacctggcactggtctccgggctgagcacagcggtagggaagctgcagggcccggacgcggggccccagcactacgggcctggccagcttcagcaacatgagatcgtgctcatccgttcgccttggcaggatggggcctgagccctggtggtacttgggatggacaacagagcgagtggtccggcggagctgctctccctgaagaagcagcaggtggtcatcccctactcgagcccacagtggcctgggggaaggaagaggcatgtgaaggcaaacccttcatagggactgggaaagcaggtgggcagtgacgcagggcctggagataggaagagtctgagggaagagggccttgtgggagaaggggacctcagtggacatggggaggaggaatcagttgtttgagctctgaggatctgtaggaattgaggagggctgggggcctggacacctaggtaagccttccacattttcttttctctttttcttttctttgttgaaacagagtttcgctcttgtcacccaggctagaatgcaatggcgcaatctcggctcactgcaacctccacctcccaggttcaagcagttctcctgcctcagcctccttcctgagtagctgggattacaggcacccaccaccacacccagcctttttttttttttaatttttttaaaattttttattttttattttattttatttttagttgagaagtggtttcaccatgttggccaggctggtcttgaactcctgacctcaggtgatccacccgccttggcctcccaaagtgctgggattacaggcgtgagccaccgagcccagcccaactccacattttctctgtggtaatacccaacccttcctccttcaacggggactcacgaagtgaaccttttcctttagttctaaattcctgaccacaccggaccctggcttctatccgttgcaggcaaccacctcctcctagagctcaaggagaatcagcgggagaggagtgacgggcccagaaatgcggaaaaggaccacaccgccccctggcggccacagcgcaagcccggtctctcctcctgctggaaggacaccggggaccgcacctccagctgtgggagttccgagagaccccgccctgcccgctcctccctggaggccgcctccacagccccccgtggcgtcctcggggatggatctcctcctacttgtttccgcagtgcgcggccgtcagcacccaactctggtccaccaggacacccgcgcagtggaacgagaggccgttgaagagcgagacctgccagggctgcgagccgcgcgcgcacggggagccataggcttcggggtccaagcgcgtgtcgttttgggggagcagcgccgcctctgcggctggagaaagaaaggggacggaatcaaagcacggagggcagggtctgggtttggggttggagctgggctgtggcactggactgcgttcggggacgggggacgcagccagaacgcgagggtggtagggaaatattgggggtttcgcgtgcaccgaagggaatgggaggagaagaagcgcgtgaaagtggaaggaagctgggatagggtagcgtggagtaatgagacagaatagggtgggtctggagggcagggactgaacgcagcgcgcctggagagctggctagaacgtcgctggtcgatagaggggcggggattgaacgcggcggggaggtaagggtgcggggatagaactcggggatcggggagaggaaggggtgtgaataacaaaacgggattgaaaaccaggagaggggtggggcgcagtggtttacgcctgtaatcccagcactttgggaagccgaggcggttggaccgcttgagctcgggaattcaagaccagcccgggcaacacagcaagacccagtctctacaaaaacaaacaaacaacaacaacaacaacaaaaaagtagtcgcggaggcatgcgcctgtagtcacagctacctgggaggctgaggtgggaggatcgcttgagcccaggaggtggaggttgcaatgagccgagattgggccactgcactccagtctgggcgacagagtgagaccctgtctcaaaaaaaaaaaaaaaaaaaaaaaaagccggatgtggtggtgcatgcctgtggtaccagctactctggaggctgagtatcgcttgagcccaggaggtcgaggctgcagtgagctctgattgggccactgtactccagccacggagacagagcactgccctgtctcaaaaaaaaaaaaaaaaaaaaaagaaggaaagaaaaagagagagaaagaaaaaaacaagaaagaaagaagaaaaaataagagagaaagtaaaacaagaaagaagaaacaaacgaaaggaaggaaggaaaggaaggaaggaaaagaagaacgaaagaaagaaaagaaagaaagaaaaagaaaaaagagagagaaagggaaagaggaagaaaaaaagtgaggggagagggcaaaaagcggtaaggcaagactcaggataaaacacggtggtgtggccgggagcggtggctcacgcttgtaatcccagcactttgggaggccgaggcaggcggatcacgaggccaggagatcgagaccacggtgaaatcccatctctactaaaaatacaaaaaactagccgggcttggtggcgggcgcctgtagtcccagctactcgggaggctgaggcaggagaatggtgtgaacccgggaggcggagcttgcagtgagccgagatcgcgtcactgcactccagcctgggcgacagagcgagactccgtctcaaacaaacaaacaaacaaaacaaaacacggtagtgtaaaatggagcggggccgggatggggcggcgtaagaggaggagaaagaacgcggcgaagagtccacggaagagcgaggatccgggtggcagaaatcggacagggcctgagtggggcgggtcacccaggggccgagccagaagaagggcccagctgacttgggggcgggccgtgctccggagcgctgggtgggtgctggggtctcgggggaggagaggtgcgcggggcttggtgacgggaacacattctcctcccgcccgtgcctcccaccggcgcctctccccgccccctgcccccgaccttaccccagagttgcgccatcagcagcggcagcagcttcgccagagcccgggcgccagaggcggcggagaggtggaggtgcggagctctcatggccaggatctgctggggtgtgtgcaggggcgggttaaaacagatgctccgttagagacccccacctcgccgcgctcatccgcccagcctgggccaccccagcccgcaagcacccttttgacctgcagccgataaccccaggggctggcagacgggagattcgggctggaacagcggtaatgggcacaattaccctaatgacgcccctcgcggcatcttcccgtcctccctgtgcccgagtggagcgctctccgcgccccagctaccctggctgcagccacgccgcgcccgaggtttccccctccttcacgcgcggggtggggatccgaggctcggagccagtgggagcctctttctcaacctcacagcggggggacttccgcgtcccgcaggtggagaaaccgaggctctaagccggctcctgcctgtggcccgggggtccccacccatcctctcgcaatccaccccaacccgggtggggtgcaggtagcttcacctgggagtcgccgataggaaggagggaggggacccagacgtgcctctgccctgcctgtggtctgccgctggtatcctctgcccagggacccctggcgggaccttcccttttaaccccaaggagtccggaagcttctccaccctcccctacccccacccccgggctccctccctttccctctgtctaattgtaccgtgggtgaggctggcactcctgggtcccagattcctgctctgggaggggccctggaatacaggcttctcccagtgcccgaaacgcccccttttcatcccttttggaactggcttccgtggggattctccgggtcccggtgccaagaaggcttcccaggcgcggggagagggttcacgtccccagcaaggctaggggtggcaggatgagaggccactgagcaagaggaaatcaatgggaagtgcatacctagagtgacaatgtgagaagccagactgtggaagaggaaggaggaaggcctagagataaagcaggttgagtaggagggacagaggctggcttgaaaagggagattgtaacaaaccaaggctaaaagagccagagagagagagagagagagagagagagagagagagagggagggagggaggcgccgaggctaagagaaacagaaacaaggaaaaagggaaacccacgcccactctgtggccgtgagtgagctctgtgtgtgtcccagtgactagcccatgtgcgtgttggggggggctgtggctctgcctcatacccatgtgtggccatctcacaccctccctgccatctgtgtgccaccaggtgacacacaggcccctgaatcataggaggtcaaagctgtgaggggcatcggcatcacctcagccaactccctcatctcaggtgaggagtgagaggctcagagagggcagagactcacaggaggtcacacagcaagtccacttgacaaccagaaggccctggttccactctgggctcctattgctcatgccagccacttctgcgaggtgaacagaccatcccaaaagatcctgagctggccgggcgcggtggctcacgcctgtaatcccagcactttgggaggccaagggggggcggatcacgaggtcaggagttcgagaccagcctggccaacatagtgaaaccccatctctactaaaaagacacaaaaattagctggggatgttggcacaggcctgtagtcccagctactagggaggctgaggcaggagaattgcttgaacctgggaggcagaagttgcagtgagccgagatcacgccactgcactccagcctgggtgacagagcaagactctgtcgcaaagaaaaaaaaaaaaaaagatcctgagttctggattctctccgtgggacatcctcttcagaggccatctaactcagtgctgctcagctgaactttctgcagtgatgttttatatgcactagctaatccagccaccaccagtcacatgtggctatccagccttggagatataacaagtgagacagaggagttacatttctggctttatgtaattttaattggaagagccagctgcggttagtggctaccatattggccagcagaggtctccactatctaattacctatcatggaagttggagaaaaacaataagctcctttggttaggtcttagtatgtgcaggctaactgacttctttacttactgtgttatacttttgcatgcagcattttacaggaaaggaaacaaacagagccttactccaggaacatcacttggtaattaagagatcgccttgcttcagatccttgctctcctagccacgtgactgtgagcaagtgactttgcttctctgtgtctgtttcttcaactataaaataggtatgaaaacagtaccgacctcacagggttttgtgaggattaagttgatacatttgaaagtgcttggaggccaggcacagcgactcatgcctgtaatctcaccacttttggaggctgaggaggacagactgcttgagcccaggagtttgagactagccggggcaacatactgagacctctgtctctacgaaaaatacaaaaattagctgggcttcgtggcatgtgcctgtagtcccagctactctggaggctgagggaggacaatcacttgaccccaggaaattgagattgccgtgagctgtgattgttactgcactccagcctgggcaacagagcaagactgtctcctaaatagattaattaatttaatttcttttaattaataaatgaaagccgggcgggcgcggtggctcacgtctgtaatcccaggagtttgggaggccaaggagggcagatcatctgaggtcaggagttcgagaccagcctggccaacatggtgaagccccatctctactaaaaaatacaaaaattagccggatgtggtggtaggcacctgtaatcccagctattcaggaggctgaggcaggagaattgcttgaacccaggaggtggaggttgcagtgagcagagatagcaccactgtactccagcctgggtgacagagcgagactctgtcaaaaaataaaataaaataaaagccattggatcagggtctagcacatagtaagcactcagtagattcactcatttagcaaatatttattgaaaccttgatatatggccaggagctgtctttggggctggggatacaacagagaacaaaccaggtgttgtcattcccagagtcacaatatttcaaggcagaatttgaatccaggtctcactgatttcgaaccccaggttgattattaagtgacagcatctcctgtagtccaggaggcccaaagaatgttcgtagagggtcttggcttagggtttcttattaacagagtgaacaggaaccaaacaccaagtggaaatggagggtgatgggctgtggtgggtgggtccagtctaattgttcttcatcgtctcctggatccagtccacatatttgcagactttcgtgtagacaccaggctttcgggtgatcgcacacggatcctggccccaggagataatgccttgaagagactggttacagaccagagggcccccggagtcaccctgggcacggggagagagaatgtcggtcagagaaagcgttgagcatggtgttagccagggaggaggtggggacggtgcttaggagtggggccgagacaggatgggtaggcactgggaaaggtgataggtttagcgataaagctgggattatgggtgggataaaggatggggttaggctcaaaaacgagtttggggatggttggagctggaaatggtgtggaaacggggatggagctgaagtttgtgctgaggtcagaaacgggaacaggggaagagatggattgggagttgcaggggtcggcgggttgaggttggggatgaaattgtggatgtcggtaaagatgtcattgaagctggggatggggatggggctgtggttggagaccacactgacctggcaggagtccttgcccccttcctgcacgctggcacacaccatggtgtctgtgatgttgccggggtaggcgttctcacacttctggtgctcaatgatggtgatgttggcgcatcgcaaggtgtgaggcaggcgtactgtggaaacagcgtgaggggctgtgggaatgagccccctgccacctcccctaatgcagtgcttgctgtgatcccgcccctgggggaatccctgtccttagacgcagccaactcacctctcttcttgtaacaatagcaacagcaatgctatccagctttttttttttttttttcgagacagagtcttgctctgttgcccaggctggagtgcagtggcgtgatcttggctcactgcaacctccgtctcccaagtttaagcgattctcctgcctcaacctcccgagtagctgggattacaggcgcacacaaccacgcccaactaattttcacatttttagtagagatgggatttcaccacgttggccaggctggtatcaaagtcctgacctcaggtgatcttcccacctcggcctcccaaagtgctgggattacaggcgtgagccacggtgcccagcctgctatccaataaatgatttatgtcagttgcttgatatacattatctctaatccaatcctgacaggtgggtataatcattctcattttatagagaagaaaatcaagattcagagaggtgaagctgcttgcctaaggtcttacaaccaggaggttatggatgtatgattgcatatcccgtccgtctgactccaaggccccaacttttgtccccacccccctatcctgacgttttccacacatcctctcaacttatcccacatcgtcactgtgaaccgcatctctgatgccctgaacccttccacaatcctgaccactccctcctcaccaccccctgccaggttcccctctggtgctcctacactgggggctggacgtgctgccccagccggaaatgaggcagctggtgccagcagtgacacagcgtgaggagagggtgaggggtcgcacagcccaggtgatggagactggcgatgccatcttcaccagcatgatgtcattgcggtggtctttgttggggaggctgttgttgaagccggggtgggggaaggactcagtggctgtccgggtctgctcacagccctcctccttctggaggttgtgctgccccaggtgaactatgtagcggctgaggtgggagagacagtagttggaggaggaaaggtcgggggagacatgggtgggagaggtgagtgacacctttgaggatgaagaaacatcgctctgcttccaacctcttccacgtctcccaccgaagcccccttcccagccatagccccatcccaaccccattcatccccccaccttcaataccaactcgagcccatcaaccttgctgacactacccatccccatctctaatccccttaccagcacccctatccctgagcttctctccatccatctccccattcccagccccccaccccggcaccgccccagcccccgcacccacggcttgaggcagtgggctgctgtcaggagccatctgggggcgatgagcgtcgccccacagagtagccgcgtcttctcgaacagggctgcctgccagggctgggagtgaggcttgcactcgaaccccttgatgatcctggtctctccccctacaagccctggagggggtgagagcaaaagaaggggctcaggaaggagaggtggtagaccaggaggactcccagaaatgggggtggggaggagagaaagagagtgggtggtctgggccctggtctggtgtccctctgggttgccctggatgctggggtcgggtattaaaggatgaaaatacttccataaggtcaaatgcagtggctcatgcctgtaatcccagcactttgagaggctaaggtgggaggattacttgagcccaggagttctagatcagcctaggcaaacatagtgagacctcctcccccatctctacaaacaattaaacaattagcctggcttggtggcaggtgcctgtggtcccagctaccggggaagctgagatggcttaaggatcacttaagcccgggaagtcaagactgcagtgagccgtgttggcaccacggcactccagcctggacaatagagcaagactttgtctctgggaaaaaaaaaaaaggaaatacttccatactggttggtcagtagcccctgtcctgggcgctttgagtgactgctcccccaactccagcttcctcagcccctccacgggaccctttacgacccccttgacctctcctcctttggcatttaaagggattatctagaagggcatccaggccctcatgaccactgctccagttcaggtgccttatgggttgttctgtaatttggaatcagccctgtcactgtccagacacagagggttaggggatcccagagattcaagagggaggatcctgccctgcccccatcccctgcgtacctgttgccagagcaagcaggattaactgcagaatcctcatggcctggaggggggaggagcgggccccaggttcctctgggaacaaggagggacatggggccgcatcactttacggggaaatcgggaggggggggctggctcatgccctctcctctctccctcacctgctcccgctccccacttgggagaaacaaggttggggaaatcccctgtttctcacagcactcagatctccaaacacttaaaatatatcttaggtgtctagggtggccttggagagggcctggtcacagctagaagcttccgagataccaagaaccatgtggaagtcgttgggaggggctttgagctgtcaagccatggttcggccctgttcaagtcagccatgggacctccccggcacatgtcagaggatgttttccttcttgccttgagagctggccaggccccagcagcttggggtggaaggacaaggggaaccagacaccgttccgtagccacccctttttcattgtcttcgcagcagagcgatatggagcctttgaggtctgctggaggggagtagggggctcagccccagacaatgtctgggacccccatcacccggcttgctgaagccctgtccgccaaacccctgcccttttgaaggacagccaagcaaagctgggcggggctggtcgaggggagggccagtgccctccgctgccctggccagcgggggtgggagcagagggccagctcagcagctgaagccatggagattagaggtaactgaggctgcggacagccatcggaggtgagaggtgtagagagaggccaggaacccccacccaagcagagaaggacagagcagagggagaaatgggtgcccgagtgggacaggtgtccttggggagggctgacacctggacggggaggggcagcttccctttcctcctggactcacaggctctggggctggggctctgggggcccagtggcggcggagacggcagtggcggcagctacagcaggtaggctgggttggagcgccaggtgccaggcaccaggcaggcgggctggcaggggggcggccctgggcgggcccaggatgactggcctccaagccctgccttaatgccccggggcggggtgtgtgtgagggccctccccggaggcctctgaggcactggctgcctgcctgtgccacctctccaagcccctcttctccctgtgtctcagcctccctctgtctgtctgtctgtctgcagccttcctttccctgccctgagtctctgaatctgtgtctcgttctatgtgtcattccctgtcattcagtaattctgactttgtgtgatttttctctttctgtccctatgtgtctgtctgcctttctctgtcctcgtccctgtctccatctccactcttctctctctgtctggctctgtgtggccctttctctaattccttctatctttgtgtctctcagtcagtctctctgactgcatctctggcaatttgtcttgaaatccctcttcttccatctaatctccgtctctctttttcctcccgtcccagccactccctctccacagccccagcccaggtgggcccctggcctcccctaggccgctcccttctcctttgcaaggagagggggggtgtgctgggatgtcacacaggtggggctgctgccaggcacaggggcaggaccggagggtgggggaggcaggtcagggcctgtggaagccgagtccaggaaagggaacagagcccttggctgtgctccaccccagggctcctctggggcctcgctcctctgctgacccttcccctgcccgcttctccctgccgcccaggcagcccgagtccagctgttcacttactggctgctgtgagacctctgcccgatgacttccagtcccgcagccacctcaacctctgcatctgcggaacccgagcgcagattcctgcttctcccagcttgtttgttttcagttaggtcccttcccttggctttcctcccctctctcccctgaccaggtgtggagcaaggcaggggagggcctaggttctgacagcagccagccctggcctcaaacctaggtgcttcctcttcctactactatgactacccttatgacgtggggacaagggactccacccctgcaaggctcagtttcttcatctgagagatgggggtgacagacctgcttgcaggggaggttgggatcaggcttccaggagggtccacttggaaagagcagactgcgggggggctcagcaaatgtgcctccgctggtatgatcacccctcactccctccctcctccagtttcccttcagtgcatttggggagatggtctctcctcacctcttgagtcccagtggagacagaatccaaggggtgggcaggaggattaaagacgtaggctgagctctcctgctttccaagcctgcactccacccttcgtcttattagaacaaagccacgtcccacattaaagatacaatgtatgcttcattacaagaaagtaaactgcagttggctagtggaaagaatgctacgttttatggacattggattaaatggtcataaatgttgactttgcagctttcatctggtattttggagctaacaattttctttttctttttcgggtcttttgtggactcttgaaaagcttataagctctgggcactatttctattatgccagatgaagaaacatgtgtcttatttatattgctgggtttttgtttttgagacaaggtctcactttattgcccaggctggagtgcagtggcatgatctcggctctttgcagcctccacctccccggctcgggtgatcctcccacctcagcttcccaagtagctgggactacaggcacgcaccaccacacccagctaattttttgtgtttttgtagtgacaagatttcactgtgttgccaggctgatctcgaaatctgagctcaagccatcctcccacctcggcctcccaaagtgctgggattacaggcgtgggccactgcacccggcctatattattaaaagtaactttttctactccatttctgagtaactactcagggaagaccctcatcctatttgagcactgggttttttgtttgtttgtttttgagatggagtctcgctctgtcgcccaggctggagtgtaatggttcaatctcggctcgctgcagcctctgcctcacgggttcatgctattctcctgtctcagcctcctgagtagctgggattacaggcatgcgccaccatgcctggctaatttttgcatttttagtagagttggggtttcactatgttgaccaggctggtcccgagttcctgacctcaggtgatccacctgcctcagcttcccaaagtgatgggattacaggtgtgagccactgtgcctggccttatttgagctctgtttctactcctatgagatagggaaactgctgagtccttcttccagtctcaaccagcatgaggacttcaaatggacagacatggcccctccttcatttatatttattccagactattgcacacttctctcaccccgctcgtgggtcttagaagggctggcaggagttaaagttccaagaagttcccaggccaacaagagtggagctaggggaagtgatggaggagatattggtgctctgagggccagaggggtacccaagttaaggggtgggggtggaggtggaggaaacaggtcagttgttcctcatgatcatccggatccagtccacatacttgcaaatataggtgtagactccagggatgccatcttgtccacagggccccacagacccccaggacaccagaccttgaaggactcccccacacaccagggggcccccagaatcaccctggaagggaagagaagtactgtctgaacaagggagacatcttatttctgttttcctccccaacccttcaacccagtcctgggccttggggagggctccaagtctggtcattagacaaaagagtataatcactttcccggaggacaatggcaatggctaaccaaaagagaagaaccactgtctctaggggccaatcccagggaagaagggtggaactccataaaggacagaggttctctcaaggacaatggctggggccctgaccaatgaggagagagagcacagtcattaatgaccaatctcaggggaggctgtcaagacaacataaagagtcgagcattctctcaaggacaatggctggggccctgaccaatgaggagagagaacactattatcaatgaccaatcccaggggaggagggtgggactccataaaggatagaggttctctcaaggacaatgcctggggttctgaccaatgaggggagagagtgccatcaaaaatgaccaatcccagggaaggtgggcaggactccatcaaaagcacagagttctctcaaggacaatggctggggccctgaccaatgaggggagagaccgccatcctcaaatctctctcagtctgggacagcaccaactggaggatggtatgggaaagacttagagccccagaaacagctggttccctgtctgggctcccagtcctctccgtctgttttgctgtctctctctgtaacccctgccccatctttccttctctgttcccttcctccctctctctccctgcccctccccctcctccattccccggtcctcccttttactccctgtctctctccctcccttatcctgggcctctcctccattattattattattattattattattattattaattattttgttttgagacagagtctggctctgtcgcccaggctggagtgcagtggcgtgatctcagctcactgcaacctccgcctcccgggatcaagcgattctcctgcctcagccttccaagtagctggggccacaggcttgcaccaccacccccggctaattctggtatttttagtagattcagagtctcaccgtgttggccaggcttgtcttgaactcctgacctcaagtgatccgcccgcctcggcctcccaaagtgctgggattacaggtgtgagcctccgtaaccagcctctcccttcctttttgaccccgtctctctgcagcatcccctttccctgattcatcctccatcagttcccctcctgcttccagcccctccccttcacttcctgtcctggtgaccacgcacgctgcctgcactggctcacctggcaggcatcctgccccgggacgccgcctgcacacaccatgttgctcgtgattctcccgggatacacaccatggcaggtggcatgggagacgatggagaggttgaggcactggagcagatccgggaatgggtctggagagagaacatgcgtgctgcagggtcccctaaatctccccactttgaggccacgtccctcttccctggatgtggcccatccatgtcaatacccctgcccctcaccgacctgtactacaatcccgaaacctccaagttacatatttatgacttaatttcatatgaatcatgaccccagatgattgacggtctctttgatctttgacatttgactttgagtggcataactcaagaactttcttgtctctccagcgtcagagacaacgaatccagacctgaccctcttcaatgccagctactgtgatctttgaccttctgtcttattaccttatgatcccagcttgatctcatatcttctgtctcctgaccccatgtccctgtctttaccttaacctccaacctcagctctgcatcttccaaacctcactgcttccaacgccagtgtcccctgatcctagtttattgggccccagcctccatgaccccaaacttcgggccccacaccccaaacgctatgacctccaatctcagatatgtgattttggatagaatcccaatttccatcctcagattttgaccagattgtacaacctctggatcccatgaccttaattctacggtgacctctaaccccagacccatgacccacaatgcccatatcctatacatacatatatatatatatatgccttttgctccagtgtgatgacctctgacacactctgacctctgacctctgatccctgacttcatacccagtcctttaacccctttggctcccaagaccccaatccaccataatctctgaccccaaaccatgatcctgatgtcccatcccacaccctgaccctttacccatccttcctctgaggtgtcatgattcgacctctcgccctgcatcccagacttgtacccatcctgacccctgacccctggccctgggccccttactccgtgggtggttggtgatgccccagcctgagacgtggcactcggtgccagcggttgcacagtcattgggcaggggcaggggttgaacgctgctggttacgcggacgggcaggcgcagccgcagcagccggaggtcgtgctcgtggctcgtcgaggctcccaggtagccgggatgggtcacagagaagccgctgtgccggatctgctcggtccagtcgagctggctgaggctgtgttcccccaggcgcacccagtacctgctgccggtggcgacggctgagcgggtggcaggcacgcagtcccccaccttgcacccctccacggacactcaggcgctcctgccgctccccactgttctgcccctcactgtctgtcctctcacccgcaactctcattctccgagtctctcttacaggctcttattcccaacctccatcaccctctttccatcttgggtgttccctgtttctcctaccatgtccctgcatctgtgtctctctctctccttttttttttttttttttttttcaagaccgagtctcgctctgtcgcccaggctggagtgcagtggcaccatcttggctcactacaacctccacctcccaggttcaagcaattcacctgcctcagcctcccaagtagctgggattacagaagcatgccaccatgcccagctaatttttgtatttttagtagagataaggtttcaccatgtgtgtcaggctggtctcaaactcctgacctcaagtgatccgcccgcctcggcctcccaaagtgctgggattacaggtgtgagccaccgcgccaggcctctctttctgattctctcggctggtgaagcccatgaaggcagggacatcagtggaccttgttcactgccttattcccaccgcctggcacggagcatgtgccctccatgctcatgcgtggacgagtgggttcatgattgaacgagtgggttgatgaatggcctctctgcatcctgctgctggccctctctctccctgagtctctgtttctttgcatctgatctcccctttcacaaaaaaagttccaggccaggcacagtggctcatgcctgtaatcccagcactttgggaggtcaaggcaggaagattgcttgagctgaggagtttgagaccagcctgggtaacatagcaaaaccctgtctctacaaaaaaaatttaaaaattagccaggtgtggtggcgcaggcctgtagtcttagctccttgggaggctgaggtgtgaggatcacttgagcccaggtggttgaggctgtagtgagccaagatagcatcactgcactccagcttggatgacagaaagagcaagactctgtctccaaaaaaaaaaaaaaagaaagaaaaagaaaaaaattccagaacatcagtctactgaggcccagagaggtgccaggcatagattctgaagttgcacaaagagtttgggtcatgttggccgggtgcagtggctcacacctgtaatcccagcactttgggaggccaagacgggcaggtcatttgaggccaggagttcgagaccagcctggccaacatggcaaaaccctgtctctacaaaaaatacaaaaattagctgggcatggtggcgggtgcctgtaatcccagctactcaggaggctggggcaggagaatcacttgaacctgggaggcagagacagcagtgagctgtgatcacgccattgcacagcagcctgggcgacagagcgagaccctgtctcaaaaaaataaaaaaaagaaaaagaaaaagagcttgggtgagacctgggccccgggcccagactgggtcaaggaatggctggggtgagtggcagatgtcatataggaaagaaagggtacatgcaggaatgggagaggcaggagggcaggttccaggaccctccccggccctccacccaacatacctcaccctgcccagcaccaccccaggcccactgctaaggaagttccactcctggtctaacctcagactctcttgttgcaggatcagcttcttcccagtgggcaccaccctcccttgtgatcctacccccagcgcttgccttcccatagtcctcccttcgcccaccccaggaagggacttacctgccgctgcagtgagccgctgtgaggacccacctgtggtcaataaggacacccccgcagcgcaggctggtgccctcaaacagccccacctgccacggctgtgagttacgcccacactcagtgccattgaaaatcttcggtgtggctgcctggctgagccctggagacagacaggggcatgggtcagagagaggaagaaaagatacagagatggagagacacacagagtgagagagagaaacaggcaggagagagagaggagaaagagagacgagaaagagagagaaagagagagagacccagtgatagaaaaagaccatgaaacatcaaagacacccagggagaaagatgcttacacataggagggaaatggagagacagagattcagagagggacagaagggaagagggatcaaaaaataggggagaccgaggtgagcagtaccctgagagctgcaggtaaatggaggcacagagaaagcccctctcctcctcaccaccaggctgggggccagagctgagatggggagggtggtggggcctcctcatgggggtgaagggatccagtcgcagtcctgccctctccctgctccgggagaactcaccaagaacacacaggagcaaaaagatgctgagccccatggtgggtcacttccaaagtctgggggaaaaggggaatctcagaggtcaccctttccctgtgccccccacctctgccctctctgcttctctttgaaggtcaccaaggggatgacctgcttgtcctctctctacctgctcccctgtgtgtcactccctcattggcagtcgcctacctccttctcaccttgtctctttgtctgccagatcctctacgtggctgtcactgtttggcctgtcctcgtcgctgctatctctccgtccacctacctgcctgtcttctcatgtgctggccactccgccagccaactctaccactctgcacctggctcctcagccacctgtcatgttgctcaaccggtccctttccttccatctgtcgctccagacagaccactgacaaagctcttaactctctttgtcctggcccatccagtttccgggttaagggaaggggaccacgaagacaggggtggggcgtgctctaattctgcagaaactcttctcagctaatcacacttaattgagctttacagctaaacggagtggggaaggaggaaaggacccagggtgggaagacccagccccactccctctctcctctgcaagcccgtcagcagccccaggactgatgactcaaggtgactagggagctgggttctaatcctgactccagtgacaaaggagggtggggagaccttggacacctggggcccatccccatgcagtgcaggggaggggcagggggaaggagaggctgtgaaagcaggagagtggacgggaggggcaggaagcccaagctagaaagagtcccagaaagagaagaagagttgaaggaacagacttccaaataggtgatcaggcaggggtagaagagagtttctgaactgagttcatatatgtacatatgaagtggatcaatctaattccataaagtttttctttgctaagaacttctattgcttaaataaaacccacagagagaaaaaaaaaagacacagggaaggagaaatggtagaaagagagagagagaatgagtcacaggacaagggaactttgtgctgttttttgtttttcgttttgagatggagtctcgctctgtcacccaggctggagtgcagggctgtgatctccgctcactgcaacctccacctcttgagtacctgggattacaggcacgtgccaccatgtccggctaatttttgtatttttagtagagacggggtttcaccatgtgggccaggctggtcttgaactcctggcctcaagcaacctgcctgccttggcttcccaaagtgccgggattacaggtgtgagccaccatacctggcctctgtgctggtttatctgagtttttgcttcatctaggaggaatggaaggagagaaagaaggagagagagaggggacagagagagaaaatgagaacaaaaagggaattcggctcagaggaagggggattgagaaacaaaccaagagaaaagcagtcagggccaggcgcggtggctcacgcctgtaatcccaacactttgggaggccgaggcgggcaagtcacttgacgccaggagttcaagaccagcctggtcaatatggtgaaaccccatctctactaaaaatacaaaaattagctgagtgtggtggtgcatgcctgtaatcccagctgctcgggaggctgaggcaggagaatcccttgaacgtgggaggcggagcttgcagtgagccgagattgtgccaccgcactccagcctgggcggcagagcaagactccatctcaaaaaaaaaaaaaaaaaaaagaaagaaaaagaaaaaaaagaaaagcggtcagacagagcgcacaaacaaacaaaaaaacccagaacaaaacagaggagagcaaactcccaccctatgactgtcttttagtccttcactttctctctgggtctccagtctctgtccgtgtctcattttcagaatcacagaaccttagcttttgatttgctcttagaaacgacctaactgctttaactcatcattggtcagcgcgactggcgttgataacgctggtccctacaaagcctcctgctggctgttaagagctttccttctttgggcagagaggataaaaaagcaccatgactgtcctttctctggaaaggacacacgtcacacgctcacagcacaaaaacgccacttcttcctttttctggtgtcaagttttacaataaacctcaactgaataagcaaagaaacaaaaacaaaaataccaacaactacccaactcaacctctctctctttttttttttctgtgtagatttttaagagaatcaggtttactgatgtggaatttatatccaataaaattgaatacaaaaaataaggcgggctcgctgattttaaggagcattcatgcaaattaaaaataccatgtatatagttagtaacaatgtattgtgtacttgaaaattactgaccgagtagggtttaagtgttctcactacaagtaaatataagtatggggccgggcatggtggctcgtggctataatcctagcactttgggaggttgagatgggaggatggattgaggccaggagttagaggccagcctgggtaacatagtgagaccctgtttctacaaacaaaaactaaaaaaattaaccaggcattatggtgacacaggcctgtagtcctagttatgtgggaggctgaggtgggaggatcacttgaccccaggagtttgaggctgcagtgagttatgattgtgccactgcactccagcctgggcactccagcctgcactcccgtctcaaaaaaaaaaaaaaaaaaaaaaaagaccagcatgggcaacatagtgagacctcatctccacaaaaagtaaaaaaaagttagcctgggggaggggcatacctgtggtcccagctacttggcaggctgaggtgggaggatcgcttgagcccaggaggtggaggctgcagtgaaccatggtcacaccactgcactctagtctgggtcacagagcaagaccctgtctctctataaaaaaaaataataataacttttattaaaaaataaaataaaataaatttgtagatgaggaatattttgcctccagaactcaacgaggcctaaaatgttttgggtttgttttaatgctgtgggtgctaagagactcaatagctgtttcctggcagtgtctcagctggaggggtcctcactttaccaaatgattttcagaaatttaaccaaggtggggccgggcgtggtgactcacgtctgtaatcccagcactaggccgaggtgggcagatcacttgagaccaggagttcgagacaagcctggtcaacatggtggaccctcgtctctactaaaaatacaaaaattagccagttgtggtggtgggcacctgtaattccagctactccagaggctgaggcaggagaatcacttgaacctgggaggcagaggttgcagtgagccgagatcgagccactgcactccagcctgggtgacagagtgagactccgtctcaaaaaaaaaaaaaaagaaaaaaaagaaaaagatattcaaccaaggtgggaggcctcatactctgtgtggggcactggcccatcccattgtgtgagttcctctagagtatttgtgaatctagaattagcgtatcctatgggcttcctttggacaagggtgtttgtcaccatatgacgtcatgcctgtgcttttggagaaacgtggatggagctggggtgttgcctgtgttgcatgtcagaacgtgatagcccagagtctggaacttcagcatgctgagtgctttgagctgaaggagattggaagacctcaggaacaagaggttctctccaacctcctcctgctttcctctcctctccccttacttctcctttgaagcagtcacagacactagaattccttttcccctgaagaccctcatgtgacaggtgtcctgcagaggaagaaatgcaacacagaaaggcccagaagaatctgaacaaatgggacctgctgggatcccccctcaatttatgaccaagagatcatacctgttttttggtttttgtttgtttgttgagttggttgggtttttttgagatggagtctcgctctgttgcccaggctgaagtgcggtggcacaatctcggctcactgcaacctccgcctcctgggttcaagcaattcttctgcctcagcctactgagtagctggaattacaggcacctgccaccacacccagctaatttttgtatttttagtagagatggggctttaccatattggccaggctggtctcgaacacctgacctcatgatcctcccacctcggcctcccaagatcgtacctggtttttcacatcacatgtctacatgccaacgccttcttcattgaacctcaaaatgacacaattttccctgagtttttgggtcttcatttctgaaggctttcatgtcacataaaactgttaaatccacttgttacgcttttatctcattaacctgtcttttgttataggggtgctggccatggactttgaaatgcataagaaaaaggtattgcgggccaagcacggtgactcatgtctgtaatcccagcacttcaggaggccgaggcaggcagatcacctgaggtcaggagtttgagaccagcctggctaacatggtgaaaccccgtctctattaaaaatacaaaaattagctgggcgtggtggtgtgcacatgtaatcccagctactcgggaggctgaggcaggggaattgcttgaacccaggaggcagatgttgcagtgaatggagactgcgccactgcactccagcctgggcgactgagcaagactccatctcaaaaaaaaaaaggtattgcaccttttcactactgcacctgcagtagtggccaggattcaaggttccccaggagcagctgggtcaggtgtattgtatcctttccacggtgaaggctagctgcagctgagaggctgttgaaatagccttggaacagagcatatcagccaaatccaacgacggtaacgtatttgccagttgctgattctatggaaagtaatactgggtatgggggccttaatggatatgtgatattttgttttgtttttgacacagggtcttgctttgtcgctcaggctggggtgcagtggtgcaattatagctcactgcagccttgatctgagctcaagcaatcctcttgcctcagcctctcaagtagtcgggaccacagatgcacactaccatgcccagccaattatttctatttttatttttagtagagaggaggtcccactatgttgtccaggctggtcttgaactcctgagctcaagcaatccttgatcctccaaccttggcctcctagagtgctaggattacagatgtgagccacctcactgggctggtacatgatgttctgaaatacatatacattgtggaatgactaagttgagctaattaacattcatccttcacattcttattttgtgtgcatgtggtgagaacacttaaaatctactctcttagcaatttttgagtcctgtagtccccgcttatccagggaaaatatgttccaagatcatggagagtacctatcgtaaaatttaatttataaattaggcgtagtaagagatgaaccacaataatgaataataatacaataaaacaattataaccatgcactgtaataaaattatgtgttatgtggtctccctctctcaaaatatcttattgtactgaattgtacccacctattgtgggactgcggttgaccacaggtacctgcactgcagaacgggaaacctcaaataaggagggactgctgtctatggtacattgttattaactagagttaccatgttgtattaatacagtaaatctcttaaacttattcctcttgcactacaggtgcacaccaccatgtccggctaatttttcaaatttttagtagagatgagggtctcactatgttacccagactggtctcaaactcctgggcttaaccgattctcccactttggcctcctaaagtgctgggatgataggtgtgagccactgtgcctggccatcaacttcttataaagttagatgtatgctggccaggcacagtggctcacgcctgtcatcccagcactttgggaggccaaggcaggtagatcacctgaggtcaggagttcaagaccagcctggccaacatggtaaaaccctgtctctactaaaaatacaaaaaattatctgggcatggtgacagacgcctgtaatcccagctactcaggaggctgaggcaggagaatcgcttgaacctgggaggcagaggttgcagtgagcctagatcgtgccacttcattccagcctgggcaacaggagtgaaactctgtctcaaaaaaaaaaaaaaaaaaaagttaaccatatgcttatcatacaattcagcaattctgcttcgagatgtcttcccaagagaaaggaaaacatatgtccacacgatgatttgtacatgaatattcatggaagccttatttataattgctggaaactgaaagcaacccaaatatacaactggtgaatggataaacaagttgtgatattccatactatggaagactgctcagcaatagaaaggaatgaacttagggcagggcacagtggctcaaacctgtaatcccagcactttgggaggccgaggcgggcagatcacctgaggtcgtgagttcgagaccagcctgaccaacatggagaaaccccatctctactaaaaatacaaaattagccgggcatggtggtgcctgcctgtagtcccagctactcgggaggctgaggcgggagaaccgcttgaacccgggaggtggaggttgtgatgagccgagatcgtgccattgcactccagcctgggcaacaagagtgaaagtccatctcaaaaaaaaaaaaaaaaaaaaaaaaaaagaaaggaagaaagaaagaaaagaaaggagtgaacataaacttggatggcggtctcacgatgtcacgatgttgtccaggctgccaagcagttaatctagacctgacttaacccctggggtccttaaaccccataaagccaccattgccatggggaaggcccctaaccatgacaatactgatttgaagctctctggaggaaaaaaaaaaaaaatcaagtataaatataaacagagtagagaggacccaatctcactccaaaatatatccagtaatcattaaaaaaaaaaaagattaaaaaatttcagcattgtgtgggtataccacaacttgtttttccattcaccggttgttgtatatttaggttgcttccagtttctgacaatgataaataaggctgctatgaatattcatgtacaaatcattgtgtggacatgttttcctttctcttaggaagacacctcagagtgggactgctggattgtacgataagcatatgtttaactttataagaagttgataatactgatttgaggctctctggaggaaaaaaaatcgagtataaatataaacagggtagagaggactcaatctcactccaaaatatatccagtaagcattaaaaaaaaaagattagcattaggagatatacctaatgctaaatgatgagttaatgggtgcagcacaccagcatggcacatgtatacatatgtaactaacctgcacattgtgcacatgtaccctaaaacttaaagtataataataaaaaaaaaagattaaaaaatttcagcattgtatgggtatatcacaacttgtttatccattcaccagttgttgtatatttaggttgcttccagtttctggcaatgataaataaggctgctatgaatattcatgtacaaatcattgtgtagacatgttttcctttctcttgggaagacacctcagagtgggattgctggattgtatgataagcgtatgtttaactttataagaagttgataatactgatatgaggctctctggaggagaaaaagtagagtataaatataaatagggtagagaggacccactcccactccaaaatatattcagtaagcatcaaaaaaaaaagataaaaagatctcagcatagtatggaatagtacaacttgtttatgcattcaccagttgtatatttggatttcttccagtttctggcaattacaaataaggctgctatgaacattcatgtacaaatcatcacgtggacatgtttttctttctcttgggaagacatcttgaagtgggattgctggattgtatgataagcataggtttaactttataacaagttgctggccaggtgcagtggctcacacctatcatcctggcactttaggaggccaaggtgggaggatcgcttgagcccaggagtttgagaccactctgggcaacatgtgagaccccatctccacaaaacatttgaaaaatcagctggtaatggtggtgtgcacctgtagtcccagctactcaggaggctgaggtaggaggatcacttgagcccaggagattgaggctgcagtgagacgtgactgagccactgcactccagcttggacaacagagggagatcctgtatcaaaaaactcctcgcaaacgaaaaaacctgctggtcccagagcgctccctggaacagagagctaatgcctgcttgagaccaagcaatagtcacagaatgagatccttcctctgagagctgatggtgtcattaggatgcatgactcaattcaagacacatagagaggtctgggtccagatacatgaaccaggaccactggaaacagggttacagcttcttactccagttcctaaacagcagctcttgaaacttctgacttaggctgcttaaatctgcaacagagggttcagtaggtctcagcaaatgcagcatccagctcaaagagcatgccacccagccggcggcagtgcagtgagcagaaggcaagaggagaaagaccctggtgctggtgctggtggtggtcatcacctagacccctgctcacggcaccaactccacagtcatccccacagaggcagaacaggacccttcggtgagcgtgtggcatcatcggtcttgacatccgaaccaaatttcggatggggagatccatcccattttttgcagatggccacagcatcaaccttcaaggcccaactccaaagtcccctcctccagaaagcctgactggggtttcttgcctcctcattgctcctacgattttatcacttaacttcttagaatgaaaacttgggcttgctcatggaaaagccagactgtaaaatattttaaagaggtttattctgagccaataggagtggtcatggcctgaggaacacaagctcaagaggtcctgagtaagtgcacactgagtagttggattacagtttggtttatgcattttagggaggcaggagttactggcaaagtcatagatcaatacatggaaggcatacattggtttggtctgaaaaggcaggagatcttgaaacatgggcttacaggttataggtgagttcagagattctttttttttctttcttttctttttctttttttttttttacatggagtttcactgtattgcccaagctggagtgcagttgtgcgatctcggctcactgcaacctccgcctcccgggttcaagcgattctcctgcctcagcctctgagtaggtgggactacagccccctgccaccacgcccagctaatttttgtatttttagtagagacgaggttttaccatgttggccaggatggtctcgaattcctgaccttgtgatccgcccgccttggcctctcaaagtgctgagattacaggcatgagccactgcgcccggcctcagacattctttaatttgcaattggttaaaggagtaaagctgtgtctaaaaattcggagtcagcagaaaggagtgtttttagttaacataaggaaatctgttaactaaaccaccaggtcagagcgacctgcacggtgcatgacgtaacccttgcctggcatggcctcaggtcctgtgtataacctggtatcttgctgtcacaaagagtttgtctcctcagctgtaatctctatcttaacattaatgctggtcagttgtgccaaaccccaaaagatagagggtacgatgaggcgtgtctgacctcctttcccatcatggcagggaattaagttttaaagttttttctggggtcccgttggccaaaagggggacctttcagttggtgaggggcttagaatttttatttatttatttatgtatttatttattgagacaaggtcttgctctgtctcccaggctggagtgccgtggcgtgaatacagctcactgcagcctcaacctcccaggctcgagtgacactcctgcctcagcctcccgagtcgctgggactacaagcactcgccatcacgcccggaaaatttttttttattttttgtagagacagggtcttgctatgttgtccaggctggtctcaaacacctgggctcaagcgatccactcacctccgcctcccaaagtgctgtgattacaggtgtgagccacggtgcccggcccgttatctcatttaattgtcctcacaaccctgctaaataattttcatgctctctgctccagaatgaggaaaccaaagcctctcaaatcaccagggaccgccctcaagatcctctaaccagccagggaagagctggaactggagctcaggccacatgattctcctccgccaaaggggaaagactgagcttaactcggtggcttccaacctgctccagcatgaggcctccattttcccgttggaaatgatcgcctagggtggtctcaaactcctgagctcaagtgattctcctcgcctcagcctcccaaacaaagtgctgggattatagggatgagataccatgtctggcctaggtttttatttttagtttacaggtgttaacgcaaactaaatatggcctgagaaggactctgtacttctgtatttgagtccttgtggatgaactgtaacctagcttaataggcaggcagaatcgaaaacctaacttagtagtatgcacctgttacatctgctaagtcttggccaatcccagcagccatacttcaaccattcatacactgctgagtgttcaaactgtgttcaaataagacatatgccgagctgtaaccaatccagccattctgtacctcactaccaatttctgtacatgatttctctgtctctctcttttttttttttttttgtctataaatctttgtccaccacgtggctgcgctggagtgtctctgaatctgctgtgattctgggggctgctcgattccggaattgttcattgctcaattaaactcctttaaatttaattcggcaaaagtttttcttttatcacaggcttatattccccactgccctcaatagcctggaaagttccacgggggcccagctacaaagcctcaccctggggcactggctgagcttggcctgactctccaggctaacaaggtgaagtccatggggccatcgaagatgcggttccattaaccaggatagggttaaatcaccagcgattttccctagtgtaggtccattcttctgtaagatggagaggatgatattccacccagctgaggccttgggagaatggaataaaaggacttccagtgctgtgccaacctggacaaatgccagaaagcctggttcgtcttttgacaaaatcccccttgattccccattttgcttttctccctttctttcttccttccttccttccttctttcctttctttctttcctttgttttctttctttctttttctttctttcctttctttctttctctttctttctttcttcctctttcttctttcttttctctttctttctcctttcttttcttctttctctttctttctttctttctttctttctttctttctttctttctttctttctttctttctttctctttctctcttgctttcttgctttcttgctttttgtgagacagagtctcactctgtagcctaatctggagtgcagtggctcaatcttggctcactacaatcttcgcttctggggctcaagcgaatctcctgtctcagccttccaagtagctgggactagaggcatgtgccaccacacttggttaatttttttgtatttttagtagagaccgggtttcaccatgttgccctgggtggtctcgaactcttgagctcagggagtccacccgccttggcctcccaaagtgctgggattacaggcgtgagccactgcacccggcttctccccctttttcaaggcttctccatctcctggctccaccagttctctccaaattctttccagtgcaggcttccattgttattaaaattcccctgggcaaaaacaggaagaggagggcaggtggctgagaaatcccagaagggggaggagggagggaacgctgagtagctcaccacctggccggccttcctgagtcgaggtggtgttgatagtcagaatctccagcccagctatgtcattattttctgttccataggcaggatttgggtggctgcctcctactctccaaaatccacaggtgtcactcaaggcagctctcctggcactgggaccttggagacagcctcgtagttacactaataataagagcaacaacaatactgaaaaaaatgacagctaccacttattgagttctcactctgtgcaaggcgttcttctgagctttccacaggagctcaattaatcctctcaaatgcattccacagtcagtgctgttctttttcattttaaaaagtttatgaatacatttgggtagtccctaatcctccggtggaaagagttgaattcgttggtggcacattttcattagtgatttggagaggatccctcttttgttttccttatttattttgttcccttttatttcccttcccttctactattgtctttatcattgtgcacattttgccgttatctttgtgaacgtgtatcctttgctattgtttttattattgtgtatccttcgcaattattttcgctctcttgtctcctttacagttatcctcattattgtgtgtattttgctgttgtatttattattgcatagccttttattaagttgaaattcacaaatcataaaattagccacttaaagtggacagttcagtggcgttcagtacattcacgacgttatagatctttttattagtatatgtccttacaaattgtgtgttgttttgtgtgcatttgaaattcatatcaatggtattgtggtacgtagcttattcttttctttccccccgccccccgcgcacagctgtgctttttctggccgggcactgtggcttacgcctgtaatcctagcacttttagaggctgaggcaggcagatcgcttgaggtcaggagttcaagaccagcctggccaacatggtaaaacctcatcgctactgaaaaaaaaaaaaaaagcataaaaaatacaaaaataagctgggcatggtggtgcctgtagtctcagctactcggaaggctgaggcaggataattaattgtacctcggaggtgaaggttgcagtgagccaagatcacgccactgcactccagcctgggccacagagcgagactctgtctcaaaaaaaaaaaaaacaaaaaaacaaaaaactatgctttttcattttctaataatatattatttacataaaataaaattcatccactttaagtgttcagtttggtgaattttggaaatcgggtggaatcatgtaagcacctccataatccaaacataaaccagctcctccctgtctccctccctcactgccctcatccttaagctgcctgccttctgccccttttgcaaaagctccccgcaggtgacactgacgggcactctgcctctatggttttgccttttttagaatgttgtatacatgtttgtcttcttttactagcataatacatttcagattcatccatgtttttgcgctgataaatacactcatgggaaggacattgttttggactaaactcttggactaggccctagcagaacagaccaaaccagaatggagtcccttgtgctaattgccatgtaatcaaactgtttttgaaaataacaaacaaacaaacaaccaggaggtttacagtaaggaatcagaaggggcccagttgacctgagctggcaggataagagagttccctctgtcttaaccctattaaaaacataacgttggaaagaccaatccacgtattattccctatttctgtttccttcatcccttttctgcctataaagccaaactctgctcagctcatgggaacaccattctattttgtggaatgagatactgcccatttgtagaattgcaactcacagtcgattagatcttgaaactaaatgtgttgtaatttagtcttttgaccgcatatcaagagttcattcctttctattgctgagctgtattccgtagtatgggtataccacaacttgtttaaccattcaccagttgttgtatatttgggttgcttccagtttctggctattataatacaaataaggctgatacaaacatttatgtatcaatcattgtgtggacatatgttttcatttctcttgggaagacacctcagagtggggattgctggattgtatgataagcataagtttaactttatgagaagttgcggctgggtgcaggtggctcacacctgtaatcccagcactttgggaggccgagaagggcagatcacttgaggtcagaagttctagaccagcctgatcaacatggtgaaacgctgtctctgctaaaaatacagaagtaagccaggcatggtggtgggtgcctgtaatcctagctactcggaaagtcggtgggagaatcgcttgaacctgggaggtagaggttacagtgagccgaaataaatagcaccactgtactccagcctgggcaacagagcaagattctgtctcaaaagaaaaaaaaaagaagttgctggctgggcacagtggctcatgcctgtaatcccagcactttaggatgccaaggcaggaggattggttgagcccaggagtttgagaccagcctggacaacatagtgagacccccatctctacaaaaaatttgaaaaattagccaggtatggtggtgtatgcctgtagtcccaactacttgggaggctgaggtgggaggatggcatgagcccaggaggttgagactgcagtgagttataattgtgctactgcactctagtctgggtgatggagtgagaccctgtctcaaaaacacacaagcagcagcaacaacaacaacaaaaagaagttgtcaaatgttttctaaagtggttgtaccattttgcattgccaccagtagtgtggtgccagttgaacttggcccatatctttgtcaacacttagtattgtcagtcttttaaattttcaccattgtagttggtagcactatacctttaagatttgattcctgctaaaacggtgaaaccccgtctctactaaaaaaaatacaaaaaattagccgggcgtagtggcaggcgcctgtagtcccagctacttgggaggctgaggcaggagaatggcgtgaacccgggaggcggagcttgcagtgagccgagatcccgccactgcactccagcctgggcgacagagcgagactccgtctcaaaaaaaaaaaaaaaaaaaaaaaaaaaaaaaaagatttgattcctattgctgtctctagtttgttacttttaactgctgcaaagtcctccatgggggaatccaccacattctatcatccactcccccattaataggtaaccaggtttcttctaatttccaccacagcaaaatactgtgtgacagagagcttatatctctgcccctttgtgatgtgcataattattacctttgtgtagacatccagaagtggaactactgggtcttaggatgtacatatacttaattcagccaagcaatgccaaattagtttctgaaataaccacaccaatgtacgttcacaccagctgtgcacaagcgttcctgtgtttccacatctctgctaatacttggggttacttaactttgaaattttcttaaatccatctaacaaatgtaaagcaattgttatttgtatttgtgtttcttggatacctaatgagtgtgagcatattttgtatgagttttttgagtttccttctttataaatctgttcatatcctttgctcattattcttattttttttttgcagtacttccttgcatatttgggtcaatatgtcaatcttaagtcaatagtacagactgcaaatgtcacctctcaagctgttacatgttgatttaccttgtccattgtgtcttttgatgaacagaaatctttaactttgatgtaatgaaattaaacattattttgcctttagatttgtctttctgaagttttaaaaaatccttcctcaggccaggcacagtggctcacgcctgcaatctccgcacttcgggaggctgaggtgggcagattgcttgagcccaggagtttgagaccagactgggcaacatggcgaaactctgtctctacaaaaaatacaaaaaataggtgggtgtggtggcatgcacctgtagtcccagctacttggcaggctgagagatgggaggatcacttgagcccaggaagttgaggctgcagtgagctgtgattgcatcactgtactcccgcctgggtgacagagtgagaccctgtctcaaaaaaaaaaaaaaaaaaaaaagaaggggaggaggaggaggaagaaaaagtccttcctaatccccaaatcacaaaaatgttatctgccattatcttcttctttttttttttttttttttttttttttttttttgagacagggtctcgctctgtcccccaggctggagtgcagtggcgcgatctccgctcactgcaagccccgcctcccgggttcacgccattctcctgcctcagcctcccaagcagctgggactacaggcatccgccaccacaccgtataattttttgtatttttagtggaaacggggtttcactgtgttagccaggatggtctcgatctcctgacctcgtgatccgcccacctcggcctcccaaagtgctgggattacaggcgtgagccaccgcgcccggcctctgccattatcttctattaactttgtagtttgaccttttgcttttaggtcttaaagccatttggtgttaagcaccattgttatacgtacttgagtaatgggaaaactgaggcacacagaaggtgagtaatttgaagactatacagttcaacaagtgacagagctagtattcaaaccgaggcagcctggcccctgaaactgtgttccgtagctactgtgtcatgctgcttctccattgaccaggatcggtgattcagaagttgctgtgtgcagagcctttaaatgccaatctttcactctgtcctcccaacagccctgagcagtaaggcctgttattaccagattaaagaactgaggttcccaaaagataaagtggcaaaaccagatctttcagactccaccctttgtgtttttgaacactaaactatagtctcccctgaaataaccaggaatcacgcaggaatcatcctcaacattcaccctcacccccacagacacagttgatcctcattattcatgaaatttgtattttcaaatttacctgcttgataaaatctgtgggtagcccccaaaccaatactcttgggacttttgcggctgtttgcaaatatgcagagtggtgaacaatttgaattgcctgaggtgcatgctcccagctgaggtcgattaaggcgatgctgtcccttatttcagctctcattctgtaaacaagtgtcctttttgtggtctagttagtgccacgttttgcacatttttgttgatttcgctgtttaaaatgccccctcaggacagtggtaaagtgcgtctagcatcctaagtgcaggaaggctgtgatgtaccttatgggaaaacacacaaagctgggtgcagtggctcatgcctgtaatcccaatacactgggaggccaaggtgggaggatcacttgagtccaggagtttgagaccagtctgggcaagagagtgagaccccatctctacaaaaataaaaaagaaaattagctgggcatggtggtatacgcctgtagtcccagcaactcaggagctaaggcgggaggatcacttgagcctaggagttcagagctgcactgagctacgattgcaccactgtactccagcatgggcaacagagcaagatcctgtctcaaaaaaataaaatgaataaaataaattttgaaaaatttaaaaagaaaatacacatgttagagaagcttcattcaggcatgagttacatcgccatcggctgtgagttcaatgcatgtatattaagctgtctttaaagagaaacacacctaaaacaaggttatatattgatcaggtgacaaaaagattgtgaccagaggctcgaaggaacctatatttcccccctagaagcaatgctttaatagttgctaattcagtgttagaggtgactttatagaacgtaagtaactactgtgaataatacgattgattgtattgccgagtttcctcagtgtgactgcaaaacgctcattctaatccatcttcatctctgttggctgagccatcatcttacccactgattactgcagtaggcttcaggttcatctcctggcttccaatactccctcctggtaccttgtctccaccagtaacccagcaaccagagtgataatccgatttcagatattcctcccctgttgacactctccaggagctcccccactacaatgggagaaagaccacctccctgactacagctaaaaagattccgaatatttggctccagccaaatcctccagtctcattccctacccagtcactcgttcatcattactgtacagtcatgctggcctgccctcagatcctggaataggctaaactcaaggacgttggcccagtggtttcctttttcagaggtatttcccccattctttgctaaactggctccctttaaccctttggccacatgccaccttctccgagaagcccttcttgatcaccctattcaaaacagcctcctcctttattctctaacacaaatccttgcttatatccttcatggaaatgattgcatttgttattatcatcacacagaaatcatcacaatctgcagttatttagtttgtgtagttgtttcttttctttctttttgagacagggtttcagtttgtcacccaggctagaatgcagtggcgcaatcttggctcactgcagcctccgcctcccgggttcaagtgattctcctgcttcagcctctgagtagctgggattacaggcgcctgccaccaccagctaatttttgtatttttagtagagacggggtttcaccatgttggccaggctggtgttgactcctgaccccaagtgatccgcccgcctcagcttcccaaagtgctgggactacaggtgtgagcctccatgcctggccatagttgtttattttctataaattctcagagaacagtttatttccacttgagtgtctaataaacagttcaagacaaaatttcctcatctctgccctaaaacatgttcctctcagtttctcgcatttttgtaaatgaaagctccatccttcctgttgctcaggccaaattgctggagtcatcttcgactcttctctttttctcacattcccccatctgatgttggcagatatggtccaacagtcccatcaaacagatccagaatctgacctctcgcctcctctacggccatcaccttggtccaggaaccgtcaccttttgcctgggctaatgcagtcccttcctcgctgggccccctgagtctgttccccatggagtagccagaggaatcctgcgcacattgaaatcagttcaagtccctcctctgctcagagccctctcatagctcctggctccctcagaggaaaacaaagtcctcgtcgtgccccacaggacccaatgcagtctgctccgttcattctctgccctcacctcccaccctctcctccttgctcactcagctccagccacaccaaccttttcactgatcttcagacacaccaaacaggctcctgcctcagggcctttgcactagctgtatcccctgctccagcagctgctcctcagatatgtgctttgctccttcccttcatcctttcggtctttctttaaatgttaccatctcagttaggtcctcttccctgaccatgctgtttaaattgcaatgccaccccttccacatatacaaccctacattcccaattcttaatcctttcttctacctcttcctcttcctcttgctctccttccccttccccttccccttctccttctccttcttcttcacagggtcttgctctgtcacccaggcttgagtgtactggcacaatcacagctcactgcagcctcaaactcctgggctcatgcaatcatcctgcctcagccttctgattagctgggactacagacttgtgccaccatgtccagctaattttttaaacttttttgtagagatgggatcttgctatgttgtccaggctggtcttgaactcctggtgtcaagcgatcctcccaccttggcctcccagtgttggtattacaggcatgagctaccacatatggcccttgtttcatttcttgctatggcttgcagcaccacctgacagcctatttctttattcattgttatggagacttcttgaaaagaatgtaagttctacaagggcagaagtttttatctgtttaactcattggttatcacttgtctctgcaacagtgcctggctcttgataggtacaaatatttgttgagtaaataaactatatttaacaacacccaggagagtgcttgcacatagtcaacactgaagaaatgtctcctgaggaaaataaatcagtgcaacactttttttggacactctgcaaattcgaagggctgttattaacattctaaggtaatattttatgggaaccatgcaaataataatagtgataaatgcttgacatttattcttgtaataatgttacaattaaaaaaaattatgaacccattttacagatgagaaagcacagagactgtgagttttataacttgtccaaagcaaggatttgcactacattttagggtcatgcacaaagatgtaacagcaagggacactgaccaaggatgttcatggaggggatacaagacggaatatttggtagacaataaagttcaggcaagaagaccctttggtatactgaaccctataactctagagactagggtgccattgattcagagagggaatgttggcagaggtggggtattggaagaatgtgggatgtaggttgggttgggacttctgagacacccataacagtgtgagaatgaaatattctgaggatccaatgttagctgtggtgagtcacagaggtacacagaatgttgtcagggcagaagattgtgggcataagagaatattttcaggatgaactatcatgggagtctagagccttcttgagtgcaaaaaatagaaggtctaggatactggcattgaataaatacttgaagagttagaggatgttgtcaaggatggtccatttataggacatatattgttgagatgggctgatggaaatatttaagaatgtgccacagacagaacgttcaggtggtgatctgggctcatagaagccacactgatgaagttgagagacctgggccattgtctgggttgggacattcaggttgttgagatgtttcagggatgcaacatctgggagactgcaagcctggcagtgcctgaatgcttctgaaacatggaatgttagctgagattgagcatttttcaggacatggatcactggttcaaatggaacactgggaataaggagcagagaagggctaagcagaccatgtgaggaagtcatggtgacaggatggaagccggtacatttctcaacttttattgtgggcccttcaaccatttttgctgctgggtttcatattttcggattgtttcacggatccacaggacgtatcttgagacacgggtgtagacaccaggccggtcaggttgcccacatgggaagtctccccaggagacgatgccatacagtgttctgttacagaccagggggcccccagagtcaccctgagttggggaaagaaagagagagagaggtgggtccttgctggggctaaacaaggcagggacagggaggtgtggggagagagtgaaagatggagagagacacacacagagaaggagactcagagaggcagagtcagacacacacagtgtgagagaaagcaatgaagacagtgagaaacagacaagaagacaaacacagagggacagacagcaagagacagaaatagggacagaaagacagagataggcccagagaaagagagacacagagaaatttctgtgtttttctctgttcctcagtttcattaaaatggtaacaacttacttcatacccatttttgtttccctggtactaaatcaccccctgccccacaccagctgaccctgctcctatttaaggctcatttgtgtctctcactattgagtgaacccattcatatctgggcagggtatgcaacacacgtgtaagtctatttctcttcctgggcccaaggcagacatcactaatcgatcaaggcacatatcattaatatagtatcatactctttctcactgaatccaatctcaacttctttattgatgaaggctattttttgctcatgtagtatccatttcctcttatttttaaaaaattaaacattcatttttaaatttttatttatttatttattagagacagtgtcttgctctatttatttctttttgttttagagacagggccttgctctatcacccaggctggagtgcagtggcatgatcatacctcactgcagccttgaactcctgggttcaaatagtccttctgcctcagcctcccgagtaactaggactgcagttgtactccaccacacctggctaatttaaaaacttttttttctttttgtagagacagagtctcactatgttgcccaggctggtctcaaactcctgggctcaagtaatcctctcacctcagcctcccaaagtgctgggattacaggcatgaactactgtacttggccatttccccttattttggtaacagcctctcctgattttttcatttggggaactgcccttctccacttccaatccatgcagtttgtccctgcccctctccagcacccacagttaactatgtgactcaggcttggcccatcagagaatcccacagctctggtggagtgatggctcaagacacatgacttaggtcagcctagtgagaatcatgcttaagacttttgtgtgaactattggaaaagagaggttctctttctaatagggttgcctagagggtaggatgtaagctcaaagctgctggggccatcttgtcatgggaagaatctaaccgagaatgaagccaaaacagaataaagaagagctgagagttaaaagaaagacagaattccaaacacacaatttgcatacctggatccatctgtgcctaaagccagacaacctggattttcagttacaaaagcctgcattttgtttaagccagtttgagttggttgtctatcactcacaagtgaaagaataccaacctttatgcatctcaacacagggatcttggcagccactcagtcaaagctggggcttatgatgaattattcctgccatccctgggtacccctttttgtcttgacctcctatgtgaggggacattgtatcttataaagattggttcccctaaggctggaaacaaagctttttccccagcatctgtcacttccattctggctttctatcctgtccaaggcacccaccagcctcccggcctcacctcacaggagtctttgccaccctcttttgtgccggcacacaacatgttgtcagtgatctttcctgggtagacttgacgacactcctcatctgagcgaagttggatgttggcacattgtagagttttggggtaattcactggggagaagaaagagaaggtctaaggtatccgacctggataggatatgggatgaaggtgaaataggcgagttgaatgggtaaagagtagatagaaaattgagatgggaagagaaagatgggagaagagatgagcacctatctgggtaaagcaacggaagtgacagaaatatggagggacatgggagagaggcgaagggagagatgaggagaaaagtggagggaaggacaaggagggaagggacaagagaatggaaggttgataaggagagtggtggagccagcggtggggagagaaagttggagagagggagttggaatagggagatggtcagaaatagagaattaaagatgggaaaagcaggaacagggatgggaagagttacgggagagttggatagaatggtaggaagagagacagggcatgttgaggagaaagatacaaacatgaggctgggagagagtcagggattgctagggagatgcaaagggctcttgtcggtatatacatcaactttatattcacatatataatgtattatacttactaagtaatgatatagaattaattattacattgaattattagacatttcattaataaccatatttaatatattaaacattttataaattatagaaatataaacattttatatgtatgatttatatattataaatgataaaattcatttacagtatataaatatataaatgtatacatttataaaatacatttataatatataatttaaatatagattatatataatatatacattatgcagaaatacatatttaaaatacataattgataaattttataatttataaaatacatttaatttgtatactttttgtataatatataattatattactatataatacataatatacatcatataatatattcatatattagatctatttatatttctatatattcatgaatttatatactcatatttttatatattcatgaatttatatttatataaaggatacagctaactttaaatatatatatttatttacttatttatatttttatatataaaggaacctacctcagaccttccctcccatctctgcccctgtttccccagccactcctatggggcctcaggccacctgtgtgggtgcataccctgggggctggtggtggtgccccagccagacacccgacaggtggtgccaggggttaggcggttgttgtgggaaaggggcagggtttggatgtagcctgtgagctggaccggggactgcagctccagaagcatgatgtcatggtcgtggttcaggtgggtggggcttctccggtattcagggtgggggatagagtggacaacttccctcacctgctcaccagcttccacacgccctagggcgtgcttgcctaggtaaactttgagccccctgtgggtgcagaaagaaggtggttaggaaagaagatgagcccatttccatccccatcccagccccaacctcttcccatccccaacctaacttcttctccatcctaccttcctcatctccaaatacatctcccccatcctcaacttcaatcccatccaaatcccctactttgattctattcccatacccaatccccatatctcaaccccaaacctcattctcactcccatgtccatccccaaccctaactccaactccatcctcaaatccaactctaccccatccacaatcccagtcccattctcatccctaccccatgctcccccggcccccacatactcctttagacagtgtgcggcagtgaggacccatttggggtggaccaggactcccccacagagtagccgcccttgcactagtagggcagcctgccagggctgagagtgggggaagcaggtgtagccacctgggagaaacccactggtcccattggtgttgagaaccttggaagactcctgggagacacctggtaaagaagagagattgttagaaaactgggatccagggggcagaggagccctggggttgtggtttctgggtttggggtaagggtcggattattgccctgggtgaccaggaactgaagatgaatttgccgacctatggcagttgctattcttgaccaagtggagatgaattagggcaaaggggtgacattattttctcaggaagtaccaaatcctccactgggggttaacagaagagttcacaaaatgaggatgttgctgataggtaagcaggagcctgactttctctccacatgcattttttatatcattctaccagaagatggatttcaggaggtagaagtgagactgacctacacatccacctaggcaatatctatccatcaatctatccaatcatccatcccccattcatcctattgatttgtccatccgtctactcatccatctatccattcatccatttaggtagtcatctaaccatctatccatccatccatccatccatccatccaaccatccatccactcatctgtccctccatccactggtccatttattcatccatccatccatccatccatccatccatccatccatccatccatccaatccaaccatccatccatccatctatccatatatccatccatgcatccatccaatcatctttccacccatctctctatcctttcactgcatatatactggttgcctccatggctttaaataccagctataggctaatcatctccagccctgaactcttctttaagctcaaaactcaaacactgttgatttggatgccttacaggcatcttaagctttgtattcccaacttgattcttctcaatcaaaactgttcgctccagtatttcccacctcagtgctcagccccaaacctgggagtcatctttgcttctcttctttccttcatcactcacaaccagttcctattggttttatctcccaaatatccagttatctccacacttctgccaccatcttggtccatgccccatcttctgtagcccaaatgactacaacattaacctaaatccttccacttttacatccctccgatccagtcttctcaaagtaggctgaggactcttcaaacaaagaaagtcagatgttgttcccaggctcaactttctttaaaataaaatccaaaaagccttcccaaggtgtgcaggactctgtgctgtctggcccttgccagcctctttgaccccatctccaacctctttcttctgacttcctctagtccagcctcatgggcctgttcttcaaacacaccaggcatttaaagaaaagaagaatttaaatcatcttggatgcccccatactagacattttatacttgctatttcctctctctgcacagtcctttctccagacctatgttgtttaatatggtagccactagctacatgtggctatttaaatttaaactaattaaaatgaagtaaaactaaattaaaaattcagttcttaagtcacaccagccatatttcaaatgttcaatagcctgaaggggctagtggataattggacagcacagatataggatatttcatatatacatatatggaatattctactggatgaccctcagaatttagaggttgtatgtctgggtccttcttaattctgagaggtcagctcaaatgtctcctcttcagaaaggccttccctgaccacctggtctaatgttgactctcctggtcccgactcctcccccattacattcttccagttggtcttcatcagaacaatgattgctattcatttctcttcacatttgtatgtattcgtttttaaaaatctctccactttgactgtaagctccattgacaacaggcaccttaactgctttattcagtaccatattcccaggacctaacacagcgcctggcacacaatgggggctcaataaataaatgctgtgtgtgccaggcactgtgtctggcattgaaagcacagcaggggtccgtgggacagggagaatccaatcctgaacatgcatgccattttgtgactgtgtgaccttatgcaaatcaccagcctcagtttccccagctgtcaagtagaaaaagtaatagttcatctctcattgcgcagttgaagaattcaagatgatcctgcatttcaaaccgtgcagcacagcaggtggcatggagagcactcagtcagtgggaaatgttattattaattattagctacaacaggaggtccctctgcctccctagctagtttccccaactacagggcaagcagttggattagctcagtggtttgcagttagggacagaagttgtcggtgagcacaggatcattttagatggtagagagatgagatttaagtaacgttaaatcgcacactcagacgctgaaccagcatccagttctcttttaaacctgattttgtcaaggataaagtctcaggatggtgctaatatggttttaacacctccctaatcctcactgagctcacttttcaaagccaggaggacacagaagcctcatcaggccacctaacatttattacactgaaccatctgcaaaagttgttttaggaaggtcaaaaagggtcaagtatcagcaatttcaggtggtccaacccaataaacatattattttcttttcattgtgcaggatttatttccttccttaccttctatttatgacaaagaattctattctctattcaggacagtaatataaagttgaacatgcttttgtttgagtgaaaaaagaagaaaaaaagctaactttaagcaaatgattaggtcaaaagttataaaaatggttttcagagcctcaagtccaggatatggacagggaaaacaaccttgattaggattctgactcaggcatcgccggtgtcattggagcaggagccttctgtctttgagtcctaggtttctctgccatgaaattggagtaattacaatgcacctacctcgccaggttgttgaggactccacaaggcgtagcgtgtgggtctcctagcctagggtgtggcactcaggagtggcacgggcatgaatccagggagtgtcgccagaggagaaaagccaccccaccttcaggccaaggatggtgccaggtgccaggcacccacagatccctcctttttcaggtcttggctcaagggtcaagccctttgggaaggcctctggtcgggaagccgccattacatctctaggcccctggcttggctccttgaagtcttcacctcatgtcaagataattattaactaattatttggataattgtttgaataacatctgcgtctgtccccgctagactccaggtgctgagagcagggactgtgtctctgcttgtacagcacccagcacagtggccggtgtttaatagctgtttgttgaatgaataaatgattcatgaacggggtttccagagaacctgcctacaacggcagggaaagatgggaaagatccataaggatcttaaggactaccaatttggggtgaggtcacataggtttggggtcaacccaaggattaaaataacaatctagaaggttctggaaggggctgagtatgaagacagaatactagaggccgggctcggtggctcatgcctgtaatcctggcactttgggaggctgacgcgggctacttgaagttagaagttcgagaccagcctaaccaacatggcgaaaccccgtctctgctgaaaatacaaaaattagttgggcgtggtggcgggcgcctgtaatcccagctactcgggaggctgaggcaggagaatcgcttcaacccgggaggcggaggtttcagtaagccaagatcgtgccactgccttccagcctgggagacagagcaaggttccatctcaaaaaaaaaaaaaaaaaaaaaaaggaatactactaataaagtaataacggctaagtggctaactttcaagtcccttctacctgcgacatactgaaggctcgacgcattacctcgtttcaatattcacagtgaccttctctggtaagcacttatagattaagcccattttccagatgaaaacaatttaggcacaaagcagctgctaggctactggctcaaagcggcagcgtcaggacgcgaacccatgtctttcagctttccagagaggacaggaagccttgaacgcgggaggggctgctgcgagggtattttgggaggtgaagggtctggggtcggagggccaacctcagccgggaaaccaggtcacccagggacaagcaggaagagctctgagctgtccccactggacccggccccgagtgggcggggggcggagctcgcggctcccacgccccctccccctccggcctgacccctcctaccattgtcccgaatggccgccgcgcctccacccccgcgcattcttacctcctgacaaggccaaggtcagggaggcgatcactagggccaggggccacatggctccgggatcgggaggggagggcagggcgggcggggcctgaggagaaggtgaagggggtgttgagggcgtgcccggaacctccgcgtctgaaacctctctgctcctgaatgtctcctcgcctcattcactcttgacagccctgaccctggaatctgccccccgcctccaattccatccttggtgggggtgcagtggcgaggtgggaggaacagtgtgcaacctcctggggctccggcgtgcagcccctcaccccaggaagccgtccctcctcccctgccctctggcgagctgggtggtcggtgcactctcgcccttttcctccagagtctgccttccattctacccctctgggtctgtccacacgcttggtattagcccaagttcttatctgtccgcgcccttcgcctctctccgtctctgcaggtttctctctagatctgagactctagcttcactctccctctccctgactcagctgcccttctgctttccccatccttcctatcccctcttctctcccctccctgccctcctccgctccccgcccccgccccaggcagaccctacctgagtgaggggcccacgaggagcgtcagccgccagctgtctagaacttcagccccgaaccatggcttttaacccctgaactccctcccccagctcactcagcatttcctggtccctggcctccccctctccacccccagtggctcagcgggatgtctccaggcacccccgacctgggcttggccctctgcttggggcggagcttccaggacgtgctgggacctaggtctgaccccgcccaaggcagagttgaacccactgtgaactttcaggcctcaggacccaaaaaagggtaaggggaaagcccatttccttccccctaccccgctgagttccatgcccatccctaacttcaacccattctgcacccagttttctaacctcttctccaaccccatgcataattcttaataggcagtcagcccccagatggccgtgttctatcagattcccacctccctatccatccctaaccataccaagtactccagcctgttcctcaaccccagtcccatctccaacctcatctcaggtttagctctcaacacatccaggttccaattcccagtctcatctcaaccctttttcttttgaaagacacaaggacacccacaattatcccatcatcctgcctccctgctcccgccaaccaccggacacaagaaggaaatcatcagctgggtggatagaaaatcagctccctcggacttggatgggggcagagatgcgacctgagaaagcaacattttccagaaatggccttttaggagcagggccagagggggtgagggagtccacggggacctaggtggagaggaaaaagcaggagccggaaagctttgaagacgtggattgggggtgggggagaggaaggaggaaggggtggtgttttgagaatgagtaggtgtctccaggaactatgactgggtggagccctgagttaatcctagggggtggaggggacaggattagggattaaggactgaggtggggtcagaatttggaagaaagccagggacgtggaccagatgaagtttggaaagagtgagagagtggaggtgtcacaatgaggataaagaatagagatggatggggcgagggctcacatggaaacttgtacagtccttattgatggagttcagatttggatgtggagatcaaatctagtgtcaaagggtaacttttaaaacatggtcttaccatgactctctgacatatatgaaatgaacatgtgtcaaagattgtatcttgactcattaataaatggcagagccagtaagatgttacaaagagccatatgcacagagacaacgaggaatgctgaaatgaatttacaaatagatgcaaaactggctattccacactgggaggaggagggaaatccattgtacttccacctggcaaaattcatgtaaacatttatggacaagaattatttgcattgctctcagatacctacaatttagagtcataaagtggctcaaagacaggaaagggtacagagacctcataaaatcagataacccatctaactttgcattggcgacacctcagtgtccaatgttgggtccatttcaaagtattttgctaagaagaaaaatatggcttaatataggaaatcagtagagtctatggttaaggatgggcctgatgacaacattaggaatgcaatgagtttggggaggtgaatgaaaattggatgaggatgggtatagagttggaggtggtagttgagctggttttgggataggattagattgtaagatgggaggtatctagggataagttggtgttggggtactgttgggttggggctgaagatggaaccaagattgaggttttggatggggaaatgttaagatgtggttgagctggggtagtgggttgacatgggtgatgaggactggccatgaggttgagtgtctatgatgcagtaggttttggtgggggtgagctgggtcataccccacctctcaaggtgaaagaaaggtcactgtctttctccaccctggacttctcccacctcacagggcggggtctgagttcactttttgagtggaattgtgttcaggtggtgtggctggaggtaggatgccaggttaagtgcggcaaccagcttatgtgggaaatcggggtacttgtaccctcctgtgacctgggtccatgcttccagagaagcctttctcacttgggaaaagctggagcctggagtgagggtggttggccttgttatttgctgaggggtgagtgccaggtcaaattgatgttaggggttatgattggccgaacgcgggttgggtagctctggttgaagtgaggtcatggacccactgagggctgggcaccttccaccccctcacttgatgaacaagcccacggctgaaagtcacacacaaactggaccaaatccaagtgcgcttctgtcacaggtgcaggtctttcctccaccacagagaaccgggctggagaaagaagaagaaaggacccgaaaaagagatggtgttcctagtggttctgacctcagactctggagctagactgcctgagttcagatgatgtgactgctctgtgcctcagcatccccatttgtaaaatggcacaatcaatagcacttgccttatggagaagggttaactggattaatacccaaaaatgcttcgaagagagtgtggcatggaccaagggccacaatgctcctgttaaataagtaaagcttaagatggaggcatctgacggttccaggaggcccctccctatcttggcttcaaaatgggattctttgtcaagcaggaactggaacttctggttggaagtgctagctgggatgagaaagtaggccccacacccaggcccagaggaggggccccaacgcaaacatgaagggaggggaagactgagagatacaaagggctaaatacacagagacagaaagatggggcaggtgggagaggacagaaagaaaattcagaggacagaggcacagagatagaaagagagagatgcccagtgagaagcagactcttggtgagaaagaggcacagagagttgagaaacatggattcttctttagagctggatccgtgttattcaggatgtggctccagtcatcatgcatcccaggcagcaataacacatcgctttcatccatcagaatagcaaaaattagaaaggtcggtcttgccacctacctgcgtgcccacatcctctgtctcctctcccatttctctagatgaacagtctgcacctgcagctaagatagatgcctccactggtgctggtatcctgtcctctcttgccttctggagggcattgctccagccagcagttctctgttctctttcctgcaacatgttttccttcttctccaaggagcagccccattagcatgcaaatatactacagtttctcccatctctcgttaaaatttgaaaaccaaccaacaaaaatttctccccactctcatgttctccttcagctcctggcccattttctgctctgtacaactgcaatccttccctaaaaagttggctaagctcactgcctgcaattcctgtcctcccgtcctccctggagcccacactatgaaggctttctctcccattgctgtaccaaccatgcccctgtttagggcaacagtgacctccacggtactgaatccaagggccgtctcttcaggttcatcttactggagttatcagcagcatttaacaagtggactactccctgtttctttccttggcttctgggacactatgctctcctggttttcctcatcactcactggttgattctcatccgtgtctggaggtggtttcttcctgtctccccagtctctacatggtggagcacctcaggcttcggtccttggccttcttctctcctctgtctatattcactccctcggtgatctcatctggtctcgtggctttaaataccatctacatgttgacgactcccaaatttatgtctccagccaggtctgactctcaaactctccacttaacatccagctgcctactcaacatctccatgttcaaaaccaacttctgttctctgcccttcccatgttccaaacatacttctcttgtgggtcttgggcttctcagcggatgttcacaccatccttttcattacctggtcaatacttcagtctcaccgtcgaatcccttttctcacaccatacatacattttgttaccaaattccatcggttctatcttcagggtggatccagaatctgactgtttcttaccacattccatctttgctaccctggtcccactcagcctgcatcatctctcacctggattactgcaagtttcctatctggtctctttgcttctgtccttgtcctcctacactctaattttaatgcagctaccagagtgaccttttagaatgtaagtcagagcaggtcacttttctcaaaaccctgcagtagcatccactgcactccaagtgaaagtggcatttccttctggttggcatataaggcccaagatcttctcttctcttgtccctctaatgctgggcatgcttccatctcagggcttttgtgcctgaaaccctcttcccccagatgtctgcatggtcccctgtattcttgccatcttcttcatgaaggccctcttgaccactgttcttgggagtctccaggacagtttcagtgattcactagaaggactcataaaactcagaaaagttgttatagttttggtttcttacagtgaaaggacacagattaaaatgagcaaagaaaaaaggtgcatcgggcagagtctgggagagaccaggcatgagcctccacctgtcttctcccagtggagtttgtggacagtgcataattcccccagcaataatgtatgacaacacgctggagcatcgccagccagggaagctcacccaagccttgatgtccagggtttatattgggggttagtcatatcgacatgactgcctgtttgtgtggctgaccttagctccagatcctctagaggtcaaattgatacaacatgtccctaggtccccaccataagtcacattgttatagattatctggcatggctcaagccccagagagacaaagacactgttacttagcaagatattccaagagcatagaggttatctcccagaagccaggcaagggccaaaagtttcactgtagtgtgcagggtttggacagtccaagcctgctgggttgtacaaccacccaacataaaattgcaactctcctctgacattctctatcctgttactctgctttattttcttctatggcatttattcccatctgtcaggcgtaatgttttacttattcatttgtttctgtctgcctcccctctagaatgtgaactccctgaggaaagaattgttcaaatattttgctcctagaacaatacctggtacacaatcagatttaatgaatatttgctgaataaataaatgaactatgggcattaaatatttactgaatgaataaatatgtgttacaggctgagaaaatgggggttgtgaccaactcagtttaccactcgaggctatatgagcaaacagaaaactgttctcatgaaagcaggatgttggaaaactgacaactgcatctgccaccagaaaaggtgctgagggcagtcacgcctcaagcacagtgttccttgtgattatccgaaagaacatctgaagcctgttgtacaaagaaaacaattatatgtacctgtgattaatcaagcagctgatcaaccgttacctctccctccctgctctttctacctaatataaatgaagggctgtagaagctcaaggctgcctttgctcaccagaagcaaggagctccctgacacattctttcaaaacagatctcttgtctttatttctgcattcgtcccccttcattcacttccgtaggaaccgtcagtgacaaatatggatattgttgaaggtgtggagagggaagaaacctaattttttttttttttgagatggagtctctctctgtcacccaggctggagtgcagtggcacgatctcggctcactgcaacctcagcctcccgggttcaagcaattctcctgcctcagcctcctgagtagctgggactacaggcacccaccaccacacccggctaatttttttgtatttttagtagagacggggtttcaccgtgttagccaggatggtctcggtctcctgacctcatgatctgcccgccttggcctcccaaagtgctgggattacaggcgtgagccaccgcacctggtcgaacccttctttgttagacaaaaacttgccagtattcggtgaaattgattaagaataggcctttaggccccttggtcccactcctgtgtgaatggtcaagaggagtcttgtatagatacataagtggcacgctcaaagtgaagggaacctaggtgtccatcactgaaggactgggttactaaacatggtggatgtgtactatgcagcggcgcttctcaaatcctaacatgcactgagtgccctggcaatcttgttatatataacgcagattccgattcagttggtctgggtgagatctaagactccagttctaataagtgattcagaattgctattttctgcaccacgctatgtgaagcaagggcaaaaaccagagtagtgctgttcaatgggacttccagtgatgagatgcaaataattctatctataatatatccgtgctgtcaatatggcagccgctagccacgtacggttattgaaatgttgtgagtatgactaaggaatggaattttaaggtgcatctaattttaattaattttaatcaaaaattaaatggccacaccagttgtggctaacggctaccatattggacaacatatgtctagaagactctggggcagttagaagcagtgaactagatgagcaaatagtgatgcagatagattgttacaagatgatttgacgaaatcagatgacgtatttaataatacaacctgacccctcacctacacctaccttccttcacacactatttaattgaatgtaaaatactgttgattatattgcactttattttgtagaccactcagaaagaaaaagaagttgccaattaaattatgaggtgtaagacatcatgctgaattaagatgtaagatgcttcctaatttcagagatgtgaaaaatatgaaaagaatgtgtctttaaatcaataaaatataatgttcaaccaccatagctggaactttgagttgcaaataaaattaaagtagtctttaaactatttttatttagctttatagaaggatgcaggttgagaattatagcatgagttatatcatgtcactgggtgcccaaatctacccaagtacacaacttcttttctctcctttttcctatagggcttgtatggctgctaagtattaaatccacagtgtgtgtttatcaccttgacacagaaggtgcaacctccacaaactgagacaaggacactataagaaaagaaaattataggccagtatctctgatgcatatagatgcaaaaatcctcaacaaaacactagcaaactaaattcagtagcatattaaaaacatcatacaccatgatcaagtgggatttatccctgggatataaggacggttcaacatgcacaaatcactaagcatgatatacctcaacagaatgaaggataaaaattatatgatcatcttaataggtacagaaaaatcattttgcaaaatacaatatcgtttcacgataaagacagtcaacaaattaggtatagagagaatgtacctcacacaatagaggccatatatgacaagtccacagctaacatcatacccaatggtgaaaacttgaaagcttttcctctaagatcaggaaaaagacaaggatgcccactctagccatttctattcaacattagcactagaagtcctagccatagtaattaggcatgaaaaagaataaaagacattcagatcagaaagaaagaagtaaaattgtctctgtttgcagatgacataatcttatatgtagaaaaccctgaagagtccaccgaaaaactgttagaactaataaatgattcagtaaagttgtaagatacaaaatttggttgtgtttctacaccctaacaatgaattatcagaaaaaaattgagaaagcaactcaatttacaatggcatcagaaacaataaaatgcttaaaaataaacttaagcaaggaagtaaataatctgtacactgaaaactataaaatgctgataaaaaaaattgaagacaacataaagaaattgaaagatatcccatatttgtgaattggaagaattaatatttctaaaatgtcaatgctaaccaaagctatctacattttcattttaatccctatcaaaattccaatggctttttctcacagaagtagaaaaaaaatcataaatatggaaccatgaaagaccctgcaatcttgggcaagaagaacaaagctagagacatcttattgtctgatttcaaaacataatacaaagttatagtaaccaaaacagcatggtactggcacaaaaacaggcatataaccaatgggacagaatagagagctcagaaataaatccatgcatttactgccaactgatctttaacccaaaggaaaaggatattctctttaacaaaagctgttggaaaaactggatacctgcaaggagaagaatgaaattggactcctatctcatgccatgtacaaaaatcaactcaaaatgggttaaggatttaaacataagacctgaaactgtaaaatgacaagaagaagacatggggaaaaaacttcttgacatttgtctgggcaatgatattttagatataacccccaaagcacagacaacaaaagtaaaaataaacaaatgcgattgcatcaaatggaaaagcttctgtgcaccaaaggaaacaaccaacagataatgatcaacagagtgaaaagacagcctaccaaatgggagaaaatatttgcaaatgatgtatctgatagagggtcaatatccaagatatataagcaatgcaaaaatcaacagcaagaaaacaaataacccaattaaaaaatggacaaagggccgggcgcagcggctcatgcctgaaatcccagcaatttgggaggctgaggtgggtggatcacctgaggtcaggagttcgagacctgcctggccaacatgatgataccctgtctctactaaaaatacaaaaattagctgggcatggtggcagatgcctgtaatcccagctgcttgggaggctgaggcaggagaatcacttgaacccaggaggtggaggttgcagtgagctgagatcgcaccactgcactccagcctgggcaacagggagagactctgtctctgaaaaataaaaaagggcaaaggccctgaatagacatttctccaaagaagacatacaaaggaccaacaagtatgtgaaaaggtgctcactatcactaatcatcagggagacacaaattaaaatcacagtaagacatcacctcacacattttggaatgactagtatagaaaaggcaaacaataacaaatgctggcaaggatgtggggaaaaaaagtgaatccttgtaccctgttggttggagtgtaagttggtgcaaggaaatgaaattggcatctcaaagtgatatctgcacacccatgttcatggcggcatcattcatgatgaccaggatatgaaaacaacctatgtgtctgttgatggatgaatggataaaggaaatgtaatatattagtatcagtataatttaatattattctgccttataaaagaaagaaatcctgtcatttgtgacaacatggatggaccgggaggacactgtgttaagtgaaataggtcagacacagaatgacaattactgcatgatctcacttacatgtgaaatctaaaaaactcagactcttagaagcagagagtagaatggtggttaccagacactggaggatggggtgggaggatgaggaaaaggagggagcctctacttcccagcaatctttcgtgcatgtcccagacctgccaccttagggttccccaatactgtgctgtccccatagaacataaggtgagtacaacattctattttagctatactctgcagtatccaagcacagaactttgagaagacagacactaagatcatgaggtcattcccaggcagacccatccaagggtgcctggtaaaggtttagcaatgactgtccggcaaagccctatctatagtgtttttcaatttcagtgcagtaaatacttcttctttggctattgtcaagctactggtgcagacagagttggggagttggaaagaggtgtgcagaaactcatcattacagacgtagtacaagagacatatctcactcccaagcataggtattagttgaaataattagcaacagttgagttttgagtatttactgacaatttttttaatcaattatgtaattatacgcttatgtaatttaatttttaatgatggctgcatttagcaactggttctcgaaattcctgaaaatttgctggtagactcttgcgagcatgtatgagctggccctggcacacattgggcctgccgcccagcccaagtttattgacctcgttactcatagggactctgctttattttaaaattatgtttatggcttcttgtctgtcatctcctgctagaatataagttctgtgagggcagggattctgactggcttgctcacagttcttcctccagcacccagaacaatgcctggtgtatagcaggtgcctaataaatagaccaatgcctggcccgtagtaggtgctcaatagctgttgatgagtgaaagtaagaaagagaatgagattcctaacacaatggtttcatgtaaattagaaacagtacactgtgacactgccttgttttccaaggatgcagggcactcaaagccatttatgtcggtgcctgtggggagggaggggagcagagccagagatgaagagtggaaataaattaataaaatgagagaagggctttgcctgggcaggaactgaagcctgtgattaactcaactctcctcacctgagatctgattaggaaaatgaggacatcttcatttgcatagaattttccaggaaacaaggcacttagttccctaccctggaccacaggggctccagggaggaggctggtagaaggcagtcatgctcaaggtcactctgcagggctgaggtgtttccgtctagaaacctgatacagtggggtggacgggggactcccaaggaaaaacacgcaaagagggaggcagccacttgtcagtacacagctcctggcttggcatggtggggccactgtgtacatgtttcttgaagtcattaattggatggataaggctgggcgcggcagctcacgcctgcaatcccggcactttgggaaaccgacgtaggcggattgcttggggtcaggtgttcgagaccagcctgagcaacacagggaaacctcatctctacacaaaatttaaaaagtagcggggcatggtgacgggcacctgtggtcccagctactcgggaggctgaggtaagaggatcactggagcccaggaggtcacggttgcagtgagctatgattgcgttacagcatttcaccaggagactgagcaagaccttgtctcaaaaaataaaaagtaaacacatggatgaatgaatacaatttaggatgattccatttttattgtcattatttattcggtttttagagacactaagcgtgttaaaaattgtcgtctttggaatacaatgccggtttaaggggtctgtgctcctgccctctgtgcctccggtcttgagtagtgatggtgacacagcaagggtgggggcttggtggggagaaaacgcctgaagcaactgctctgggaaaggagagatcagagccggagtaaagatcaggatgctggggactggggctcctgggtctgagggaggaggggctgggcctggactcctgggtctcaaggaggaggggctgggggactggggctcctgggtctgagggaggaggggctgggcctggattcctgggtctgagggaggaggggctgggggcctggactcctgggtctgagggaggagggactggggcctggactcctgggtctgagggaggaggggctgggggcctggactcccgggtctgagggaggaggggctggggcctggactcctgggtctgagggaggaggggctgggggcctggactcccgggtctgagggaggaggggctgggggcctggactcctgggtctgagggaggaggggctggggcctggactcctgggtcctgagtagagagaggagggcctgggcagctgacgaggtccatcccaccgtgaagaccatcatttgtcccgcatcgtttcctcaatccagcttctgtacttgcacaggttggtgtagacaccggggtagccaggcagggcgcagcgctccattccccaagacacgaggccctggagctgtcctctgcacaccaggggtcccccagagtcaccctgagggggaggaacagaaatggagacactgatggacaggtagccagagccaccatggcacagagaacccgagaagcagacacagggagacaggcagagacactggtggacagttagggacacagtcctgccccagctctgaggtctcagccccggaggtcggggcacttccttccctctccgctgggtctggctctgtctctgtgtgcacctgcctgtcccttgaatctcaccaggcccctctctgttcgctccaactgtagaacatttgtgtgtctctctttttctatttccccatctctgcctccctcaaggatgcattaagatttctagaagcctcagcacagcctttcccagacccatatgagcagaggccactctgcgatctttccccaacctgcctcatcccattccaccaactaccctaagagggttactcccacctgacagatgaggaaactgaggcatgaatgctctgagtccattacccagggggcacagggctaggaagcagggtggcctggctatcggaatctctctgtgcctgcggttcactctcttctgaagacctctgcagacttccatgctcctgacatcatttgcttaaatcccagtcccaaataatccctaccacagctcccatcctgggccttacctgacaagagtccttcccgccctggggaactcctgcacagaccatgccaggcgtgatggttctaggataggccttctggcacacctcatccggggagatgttgatgttcacgcattgcagagaggcggggtacctggctgggggacactgcagggttataactgggtctaccctcccataagacccaagggtccaggcccccagcccctcctccttccgacccaggagtccagccccagcacctcctccctcagacccaggagtccaggcccccagcccctcctccctcagacccaggagtccagacccccagtccctcctccctcagacccgggagtccaggtccccagcccctcctccctcagacccagaagtccaggcccagcccctcctccttgagacccaggagtccaggctccagcccctcctccctcagacgtatgagtccaggcccagctcctcctccttgagacccaggagtccaggcctcagccccctcctccctcagacccaggagtccaggcccagcccctcctccctcagacccaggagccccagtccccccagctccacctcctggagacccaggagcccaggcccagtcccctgctttccaagacgcaggagtcctcaccgatggggctggatatagttccccagcctgacactcggcaggaggtcccggggctggcacaggcctgggtgacctcaatgggcctgactgccctcccgatccgtgcgggctgctgtagctgcagcagcatgaggtcgttgtcgtgggtccgggagttgtagttggggtgcgtcacctgacgaaccacgcgcagcacctgctgggtggcctcccacctcctcaggttgtgcttgcccagggcaacctgaaggatcctggccacgacccccaagagaagcgctgctcagggtctgagccagagactcctccccaccctccagcccggttccctggccgggtgacgagtcttccccgaggtctagcctgcttctcactaactgcaggccgagcattcttggcctcctgtgcccttccccatggccagggcattctctcggcccagccccagctgcctctccttccgctcttgggctgggctccagctcctggcttgggaagaaggtgatgattgggagagcttggctccgtgccagggtctgtgctgggctcggtgcattgagtcctaagcgaaactgcgttatgagtctaggctctaaatcggaactgatattccggagtaggcaccattctgtttctagcctgggttctgagttctagacatcttaaacttttgactctatgctaagatcaggattctagatcgaacctggattatgacttgatttatttatttattttttttttgtgatggagtctcgctctgtcacctaggctggagtgcagtggcacgatctcagctcactctcgacctccaactcccagttcaagtgattctcccgcctcagcctcccaaagtgctgggattacaggcgtgagccaccgcacccagcctctacaggtctgtttcatattggattatagggctcttggttctggactctggccctagcccttgacctcaggttgggctctgggttctagttggagctctaggttatggcccggatccaagattctagagtctggtttgcattctggcctttatattctagactctggcctgagctttgatctctaggttctagactgacctgtttatggcatagatatggcttataggcattttgacctcttggctggggtctgggttgtaagttcagatctagaatttaggaggggtctaggttttatatggggcttctgattaggatctgcattctgggatttattgattgattgattgatatggagtttcgctcttgttgcctagcctggagtgcaatggtgcgatcttgactcactgcaacctccgcctcccaggttcaagtgattctcctgcctcagcctcccgagtggctgggattacaggcatgtgccaccatgcctggctaattttgcatttttagtagagacagggtttctctatgttgctcaggctggtctcgaactcctgacctcaggtgatctgcctgcctcagcatcccaaagtgctaggattataggcatgagccaccgcacccgccacattctgggattcaaacactgggttgaagtctgctcatagcggagctatagactagactctgaactaaaccttgggtgtgaaacagcctccaggttttgcctctattcttagagttgtatgttccagctgtgagcagcgttctagttctggatttatggctagactgcaggtcctgaactgggctctgagttctacgtagtgtcctgagtttctgaatgtagacggggtcctgaattcagccaccaatctggaatgggctaagcttggtctcgatgtaatgtgtggcctctggaagaatcactggatcagatgttcggttctcagcaggtccatgggttccaagctgcccatctgctttcagaacctatgctgagttcgagatttatggaggagcccacatcccgagctgtgtttttgttccaggctcttctctagacctcaaaccaggagccagccactacattgggttctatacagagatccaggttctcagctcagctctagggctttagactctggaattcactaggtacagggacaggggagggggtcacttacgggcggccgcagtgagcagcagtgatgacccactggcctgaaagcagggcgcctccgcagaggaagcggcgcctgggacccgccagcagggccgcctgccacggctgggagctccgggtgcacgtatggccaccaattatcttgttctcatcctcttggctctgtgtcatggctaggagtggacaggattgggtggggaaagtagatgagcaaacactctccactccacaagtttgtaggattccaaaactgacaaatccccttccttttggtctaacccctaaactgcccgcctctatctgtcccacccagggtgagacatgcccaatattgaccccgttattgccccagcacggagagctttctgactcacctcccaagtcacctccgtagcatctcttattttgtgccgtggccaccttatccagggccttgctacatctacgacccttagctctatgctcccataatttctgtgatcacttctcgaaatatgccacatttccccccaatgagtccttccccaacacattcaaggacctccctgtctcctccccaacgttcccactcagtgggaccccaaggatccgccatctcttgccccacacttgcccccatccacctcacacacccatgccacgatcccgccaccccatgccacgatcccgccatcccatcatccttctccaccttccctctgacaacaaaacatctttctgacattgtttctttcctaacacagtcaggtagagccccgtgatctttctgctatgacccactcaggacctaatagttccctaagattccttatgtattttgcaccagaccttataaacacctctctccccggccccacaattccctagcacctccacaactaggaatttaggcctccagcacgttcccccaccatgacccccaaaccactccctgctctttcttatgaggtcaccatgagcatccaggggccccaaggacccatccccatctcttctcagagtctccaggggacccccttgtgtcatacccaaccgttctcttacctatagccaggacttgaagtgctgtcagcaggaggaacattttaggggctgagggccaggtcctgtcaaatgcagagaaaaagtgagagagaaggaaccttcaacagaaccgggggctgagaggcagagacagcaaggggcacttacccagagcccaagaccctcagggacatgaagacacagcagagaggtagggaccagagacgaggggggcggggcctgcaggctctgcgggcggcaggtgggaggatgtggagcagggcacaggtccctccttgatgtcttgatgaaggaaggaggggaggtgtctctcttcctagtcacactggcaaagccttttatccctggtaaggacagctggccctgcccccacctcccgccgccctgcttctgacatttttttttttttattgcctagttcccattccaggactccctgatcccatcccctccctcccctgtctggccaaaaaagcagccacaattgttcatgagaacccgcccagggaagatgctataatctagaaggaatcctgggaggggaccccagggcagggtgggcaggggagggttcccagttgctggaggtggtggatctagtggtggagtcaggaaaccagggtggggagtgtcagaggaaagggcacgaaggggctgagagagggaggaagagatggactgagagagggagtcacgggaggagggagagagggagagagagagagagagagagagagacagagagagatggagagagagaaagacagagagacacacagacagagagagacagagacagggtgacgggggggagagagagagagagatggagagagagacagagagagagccagacagagagacacagagagagagagagaaagagagagacagagacagagtgacagagagggggagagcaagagacagagagagactgggaaaatgaatgagaagatatgacagtggagagagaggagtccaggaatacgagcacagaggcaggtgtgctcatgagagaaggaactgaggagagagctggagaaaccggtggaagttggatgtgacagggaacagaagaggcagacggtgggaaaaaaacaagacagaggaagagggagacacagagacgcagggagagaggggtgtggagaagtggagatagaaaagcaaaagacggagggaagaaggtggagatagaatggaaacagacacacagaaagagaaaacagtggagagagaggagagaggccgagacgcccccaccatgcggcactcaccacaaacacacacagaacaacagcgatgatgatgaaggcagtgcgggcatgagacgtggaagagaacgggacatggtgggagaaagaggatgggacaggcaggccgatggcagaggggagacgggaaggatgggcacctacaggggatggggacaatgacagaggagacggaggcctagatgagagatggcagcgccagggagagatggagaggaggggtgggatagaggacgggcaggaggtgggcgggagatacctggacctggagcagagctgcccaccttgctttctcactttcgactcctgagagatgggggagcagaggccccagcagggagcaggaaggttggtgccagaactggcattccccagcttgggatctgctaggtgcagagacaaagtgagagctggagatgcaaagagagagtgacagagacccagagagggggacagagacccagagggagagggagagagacccagaaagagaaggggacagagattcagagacagaaggacagtcttaacagacggggttggaaattcaaaataggagacggcagagagcaggagagacagagtgaatgagatggggaaggattctggccagcctgcaggggggttctggagttgggggggttccatcctcatttgggggagggcctaccctcctcagcccctcccctagccccttaaattccccagtgcttgtgtccgtctctgggcctgggcagccccgtacctggaccacgtggtgactcaggaggctgcttgcctcccttggctaccccaactgttccccggcctcagcctgactcagcctccctccacctcggcacccccctaggctggctctttgagctggagcttggcctgggtctgtctgtacacctggggacgcactgtctgggcacctgcatctggagccacacacccatctctccccaggtgcctttctgtgattcctgaactgtttctgtttaactatgggcctccctgctttgagctgaaggccttgggaagccttcccggcctcctctgccttggttcaggctcggcatcaacacaagaaccccctctttatttttaaatttttaaatttattttatttatttatttattttatttttttttctttttttctttttcttttttttttttttgagacagagtctcactctttagccccggctggagtgcagtggctcaatctcggctcactgcaacctctgcctcctgggttcaagcgattctcctgcctcagcctcctgagtagctggggctataggcacccaccaccatgccccgctcatttttttgtatttttagtaaagacagggtttcaccatgttggccagtctggtctcaaactcctgacctcaaatgatccaccctccttggcctcccaaagtgcaaggattacaggcatgagccaccacacccgtcaagaactccctcttttaagaaagggttctcttgggacccagggatggggtggcaggagggagctgctctgtggtgacgaatcagctttgcactggatgtggcggtgattacacgattctacacatgagataaagagacacagaagcccacgtgcacacacacacgtgcaaagaaatgcgtgtgaaaaatgaacgcgcagtgtgatctgtagtctcattaatagtttggtttctgtgttgatttcctggtttccattctgaacgacagttacacaaggtgtcgccacggggagaagtaggtgagggagattccctatgctgtgtgtgtagcctcctgtgagtctgtaattatctcaaaggaaaaagttaaaaataaaacagaatttcctagtaaacacaaggtctccctgttcctaaaaagaacaccctacttaagcagaaggccttggtcaacccccaggagcctgggagtggctccttcatgccactctatccctgagatccaagagaatcctttctttaaagggtggcaggggggcaggtgctgtggctcacgcctgtaatcccagcactttgggaggccaaggtggatcacctgaggttaggagttcaagaccagcctggaaaacatggtgaaacccaatctctactaaaaatacaaaaaaactgagctgggcatggtggtgggtgcctgtagccccagctactcaggaggctgaggcaggagaatcgcttgaacccgggaggcagaggttgcagtgagctgagattgtgccactgcactccagcctgggtgacagagcgagactctgttgcaaaataaataaataaacaaacaaataaataaagagggggttcttgtgtttatgcagagcctgagccagggcacagaatgactggaaggctccccaaggccttcagctcaaaggtagggagacagctggagatgcagctgatgaggcccagttcaccgccggtggctcccaaggacttgccgtccccagcccggacctcagcacctgccgtgccgtggccaggttgctgggccctcttcccaccacatgctaggttcccagggtatctcgctcaccactccaccacctgcttggcacggtcttgtttgctgtgccacgggcatcgataaacatctgatgaatgaatgaacacagagcctcagtcgctgctcctctgtgaactcacggtctggtgaaacaggccagcggggcaacaggaaactccatctggtgtcacgtgtgctcccctggaggaggctgaggggctggatggagcctcaggtgtgggaaagggttccaggaggaggggcagtcttagcaggttcctgcagatgaataggagtttgccagggaggatggacagtgtgtggagagggtaggagggaggtgagtggtttcgagtagggatggtggggcaggaggatggtgagagagctcagagcgtaggagagaggagtggccaagatgagcagggccctggtgctgcaggggcgagaattttactccgagggtgatgggggatggtggcatgatcctgagtaggggagagcagaatccttcgggatactcaggtctggagctcaggagagtgatggggcatcacggcacggatggtgctggataccagcggtgtggagcccacctagggagagggtatacagtgagaggaccccactgaagactcacagctcagggggtaagaaacagttatgccaggggtaggagtgattgaagagctaagagggacaccaggagggagcagtgtcaggaaagttgagagcttttttttttctttttaaacagggtgtcactctgttgcccaggctggagtgcagtggtgcaatcacagctcactgcagccttgaactcctgggctcaaccatcctcccacctcagcctcctgagtagctgggactacaggcacgtgctaccacagtcagttaatttttgtatttttttgtagagacagggtctcacgatgtagcccaggttggtctccaactccagggctgaagtgatttgcctgccttggcctccccaagtgctgggattacaggtgtgagccactgcgcccagccagagagcattttttaaacgagggagtggcaggggcggtcagatgcctctggaaggaagataggtgatgggtgattttggagagaaaggttttttgtggtgtggtaggggtggaagctgggcggagcagaggagaccataggtgcggacagctcttgggtgtgaggggaggagaagggtggttgatactgatggctgtttataagaaaggaaaacctggatggcacttggaacaaaaacaatcactcacatgtattctgtgctcagcacagccagggactgtgatgaaaccttggttgtttttttttttttttgagatgagtctcagtctgtcacccaggctggagtgcagtggcaggatctcggctcactgcaacttccgcctcccaggttaaagcaattctgttgcctcagccttttgagtagctgggactatgggtgcccaccaccatgcctggctaatttttgcatttttagcagagacggggtttcgccatgttggccaggctgctctcaaactcctgacctcaggtgatccacccgcctcggcctcccaaagtgctgggattacaggcgtgagccactgcgcccggcagatgagaccttttaaaaaatatttaaattttaagaaaattttacaattttttattgttgtaaaataaacacagcataggccaggcgcagtggctcacgcctgtaatcctagcactttgggaagccgaggcgggcagattgcctgagctcaggagtttgagaccagcctgggcaacacggtgaaaccctgtctttactaaaatacaaaagaaattagctgggcgtggtggcgcacgctgtcgtcccagctacttgggaggctgttgcaggagaatcacttgaaaccaggaggcagaggttgcagtgagccgagattatgccactgcactccagcctgggcgagagagtgagactccatctaaaaaaaaaaaaagcacaaaatcaagcattttaaacatttttaggtacaattcagtgggattcagcagattcgcattgctgtgtagccatcactactctctaactcccccagatgttttcattgtcctcaaattctgcacccactaaatgataactccctgcttctcccttccccagcccctagcaacaatcattcgactttctgtctctatgaatttgactactctaggtccaggtacctgacataataggaattggattttttttttttttttttaagagataagtcttactctatcacccaggctggagtgcagttggtgcagtcatagctcactgcagccacaacctcctgggctcaagcgatcctcccacctcagcctcctgagtagctgggactacagatgcacaccactacacccagataattaaaaaaatattttgtagagatggggtctcactgtgctgcccaggcttgtcttgaactcctgggcccaagtgattctcctcccacctcagcctctcaaagtgctgggattacaggcgtgagccactgcacctggccaaaaggaatcatatgatatttgtcctcttgtgactggcttatttcactcaacctaatgttctcaacactcatccacgttgcagcatgtgccaggatttctttccttttttaaggctgattgctattccactgtgtatatagaccacattctgtttaaccagccaagttctttatctgggttagtgtcttccctttcttttcctccctctttcccttcatctctccctcttctcccatctgccttccttttctcccccacctcttttcagcaaatatttatcaagcacctactatgtacaccctcatagttctaggggatacagcaatgaacacaatagataccccttccaaaaaaatctttgccctactgatctgtatattctggaagaaaaagaaaggaaataaatacgatatacgacattacaagttatgagggtctatgaaaaggtggcagcaagggcttccctgcagtggaaggggtctgtaggtttgggaactgcaagatggtcagtggggggccaagtgggtgaggggagaatagacagtgaggatagtgaggtcatggaaagtctggactcctcgggagaggcactaacttgtccccattttacagacagggaaactgaggctgagagaggaggtggcttgtccaaggtcccacagctggtaggtgcaggaggtatcagagactccaggactgtccgaacctccgctccacactgtaaactcttccttctgttgtctcccaaggccactaacaagttcatttgcacaccgatgtgtgtgtccaacacgatttgaacacatttcacgagaattaacttgctgacaccttcccgtagccatgggagagctcatgagtacctccggtattgttactcccctcattgtacagatggaggaagccaagatggagatgctcggccacgtgccaaggttacacaacgctgaacgggggcgccgtgatttgaacgcaggtggagagctctcaaccacctcacgaaatgttcaagaacaaaggagtggatggtgcaaccagcgatgtggtgggattagccccagacatggggaaagactcctcttacattgtttcgggaaggaagaaggaaagggcaggtcaggtgcgggtagggtgtgagcccgatggcaggaagtcgaggctggtccgtcctgtggcttgtttcttccagggagacgtcagtcggctcatctcaaggggccttggtgggtggggttgggaaggctgagggtggtggtgaaggggcccaggtgacgctgaggatcacatgttttaaggggcaccctctcagcagttggcggattttttttttcctccaacttcctggatgtagacaaagagaaggcgcctgcaggactgggtgatggtgggagggatgctgggactggggagctgagggtcgccagggcagaggggactctggggttgcccttgaactcctgggctcaagtgatcctcctcccgcctcagcctctcaaagtgctgggattacaggtgtgagccagtgcacccggccaaaaggaatcatattatatttgtcctcttgtgaccggcttatttcactcaacctaaagttctcagggggtggagacaaggggtgttggtggggaggctgcctgaggagggtcagacgtctttgaggtggaagaacaggaatggcgcagacaaccatgcacagaggcaggggaagctgtggtcagggagtgggaatgtgggattttgtggtttcagaggtggagctcttccagatagagatagaggctgggtgtgactgtgggaacgacggcgggggaggtggtctctggccacgtggaggtagtgggatgcagaagctggggtgtcctatctttggaagctggggggtcctctctcctgaagctccccactccatgtgtcagccagtacccgtctctctgtccacttatcatagcaatggggcaggtcaccaagggcttcacatacatcctctcacatttaaccctcgtgaaagccctgtggggtgagggactcttattactaccacgttatagatgaggaaaccaggccttagacaagtaacttgggcaagtggcacagccaggcctcgaacccagatcatttggctgttaaacaccatgtcaccctgtctgcaaatctgtttccatgtcagcgagggtggggagttctgtttgccttgttccccgatgggtccccagctcctagaacagcctggcatgagtgtgcacacagtgaattgtcgtgggatgagcagacagacccccgtctctgtcttcccttgggtcctgataggctcttggttggcaactttcctagtgtctaccgtgtgccatgtctcccttaattctcccaccagccccatgagacacgatgacactcattttacagatgacgaaatggagagaaatgaggtcagttgtctaacgtggcatggaagggctgggatttgaacccgagccagcctgacttgatgcctctctgcttctgatctcatgtgtgtcattgatgatccaaactctctccgggtaatctctcagacctttccgagccagcactgaaaactgctttgtgccaggcggcctctgtgtgcaaacctgggggcccctgatgctcggctgatggacagtgaacatccctgccccccatcccacctctattacctcccatttatttctttttttttttttttttcttttgagacggagtctcgctctgtcacccagcctggagtgcagtggcacgatctccactcactgcaagctccgcctcccgggttcacgccattctcctgcctcagccccccgactagctgggactacaggcgcccgccaccacgcccggctaatttttttgtatttttagtagagacggggtttcaccgtgttagccaggatggtctcgatctcctgacctcgtgatccgcccgcctcggcctcccaaagtgctgggattacaggcgtgagccaccgtgcccggcccctcccatttatttctgtttaagctccacggtgtaccccaaccttccccctgtgtctcctctaagttagtatcctctccccaggtgcttgggtcaaagacgcttgggagcgtctctgattcctccctcgctctcacctcccattttggcagttcctgtcacttagctccaaagtacacagtaaagaatccacccacttgtctcctctcagtcgccctcttccaagtcacccttatctcccacctacacaggtgcaagagcatccaaactggtctcgctgcttccagcctcgacccccaacccctccctccctcgccctgctaagtccattctctactcagcagccaacgtcttcttaaaacaatatcatgttaaaacctgcttaaaacccatctgtgagtgcccactgcaattataataaaacgcaaatgcctccaaggcacttggtgtctggcttctgtccatccttccaacctcatcactgcattgtgtactgtgcctctgccccctggaacttcttccatcttctcaacattgggaggcgccttcccaacttagaggcttggcctttgctgttccctctgcctgggacatgcttcccaccactctgcctgtgatcttccttcagatttcagcttaaaggtcatctcctgaccaccttctccagagctggcattcccttccagtttccatctcagcttcttgtgggtttccttcctacaccttatctcaatctgtaattgctctatcggtttgcttccttgtttattattattgctggttttcttcctctctatggtgtttattactgtcggatgtctctcatgttttatttatttactttcttactcttacgtctactctgtctcccacgacttgaatggcaaccctgacagtgcagggattttcactgtctttatctgcctctatgccctggcacataggaggtgttcagtaaacctttgtggaaggaagaggcatctcttattagaactgaggcttcacgagggcagggaccttgtctatcttgttgctgaatccctgttgccacgtctgccacccggcacgtggcaggggctctataacaggctgaaggaggaagatcatctcagagcctgtttagaatctctgcttttctccagaatctctgcactcaatgtctccacctcctcagacctgacagcgatctccaatgacccagccccaggagagcacacaggtggaagatggggaagccggtctttctgagactgggctccaaatccctgcagtggggagaatgcttctgacctgatgggatgagacgctggcgtttcgccccactgccacctttagttgtgtttatgtagaggctgtgtttgccaaggccacaggccacagcaaaagtccctttgtccccatgaagactggggcctcctgtttagctaaaggagcgtctgtgttcacttgggcctccagcctcagcagctccctgcccctgccctccatatttaccaagccttcctcctccagcaaaagaatttcccgggtttaccatggccaccggcatatgtggcgaacatcttttttgtttgtttttgttcagtctgcctggaagaaatgtctcttggatttacactgcctttgagaacacgtagggctcttcgcccttaggaaacacaccctcagcattgaatagggttcccagctcttggtgaggacttcttaaatggccctcacatccattctcaccatcctgacaccctcgccactgccccagttttggctaccaaatccattcccagacctttgtcccagccctctccctggcctcctggctgagtcttccctactccagtccttcctggacacggccccagagggatctttctgacacccagagccggccctgtctgctctcgccctccctaagtgccccatcccggccagaagaattccagtgctttatggagggctggccaccccctccaccatcctgcacagggaggagcggcaaagcctcgcagggacttggggctcccatgcctgcaggcctctgtgcctgccattctctctgccttgcacatttgtccccatctcgccctttcctgtgctcattcttactcatctccagctcccggtttacacattacctctttcaggaagcgttccatgacgcaccgcactgagttagaagccccacctcaggcctcccctgtgtccctcctaagccccacggtggcacatatccctccggatcttgacttgccagtatccctgcccgcctccgctggcagacagggagcccattgagggcagggactggggctgactcagctgcattgccccaccgccctgcgcagggcccgccagctccaaggaggcgtcaggaaatgtttgctgcatgaataaaggggtgatcagtatccctcctttactcaaatatcctccatggcttctgcagtgcttagaaacaaagccaagccaaagtcgcttctccctctcacctctctcctccacctgccccctctcctttttccctcaatctcagagtctgcacttgctgtttcctgccaggaacactttcccagagaccctccacccctgtgctctctgcctcaccctgcacctttccctgaatatctcctccttgaagcctccccgtccctcctacttaaatagaagcgattatcacgatccaacataccatatatttgacttatttttctcgtttttttttttttttttttgtatctcccttgagggcatggttttgttctgttcactgctgtcacaaatcacctgctcaaaaagtatttgttgagtggatgacacaggggtcttgaggtcaaggagtgtctggtgtttatacggggccttaagatctctgccaacctgtgtctctcacccttaaggactggctcagagaccagcgggcaggtgggcagagacagctgagctcccagtcggggctggggagggggagacctggctttgatgtcaatgaccaccggatgcacaggcgaggtcacagcgaccccttgtggccagagacgaaaagagcacctcccccccgccccgcttttttttttttttttcttttttttttttgaaacggagcctggctctgtcgcccaggctggagtgcagtggccagatctcgagatcttggctcactgcaacctctgcctccagggttcaagcctcagcctcctgggtagctgggattacaggcacctgccaccccgcctggctaatttttgtatttttcgtagaggcagggttccatctcaaattcctgatctcaagtgatctgcctgcctcagcctcccaaagtgctgggatttcaggcgtgagccaccacacctagcacccccagctcttcagagacccccatgaggaaggccgcaagcccaggctaagagggacggcgagcactcactaaatgccaggcgctcttctaagcactgatatgtatttttaacaataaccacaggacggaagtaccattcctccccacactgtacagccaaagaacctgctcaaggtcacacagcattcccggcagagcttggttctgaactcaggcagtctgggtctaggaagcacattgcaaacctgcgcggtccagtggagtgcccacaggtcccatgtggcagccgaactgtggggagtctggattgagatgggccgaaagtgtaacatacacaccgaattttgaaaactctatatgaaaaaacatgtataaaacatctcgcttaagttttaacaaactgattacatattaaaattataatattttgtataagtgggtcaaataaatttattaaaatatcacttgtgtcccttctctaaaaatacggctatgaaaatattctaaattatacatacggtttgcattttcgattggagagtgccttaaaccacaaaagaaatctaatccactgcccaccccaccccatgcacagggacaaactccaatgaacagaagggaaaaggtcccttacccaaagccacacagtaaatcactggcacgtcagcaataggaacctaggtcccctggcttccagcaggtagcccagcaaaagtgtccagagctccagctcctttgctgatttgctgcagtgtggccctgggcaacttacttcacctctctgggctgtaatttcatcctttatgaaattggtgctgaaggaaccaacccaaatgcccatcaatcaacgagtggataaagaaactgtggtgtatacgtatacgatggactactactcggccataaaaaggaatgaattaacagcatttgcaatgacctggatgagattggagactattattttaagtgaaataactcaggaatggaaaaccgaacatcctatgttctcactgatatgtgggagctaagctatgagggtgcaaaggcataagaatgatactatggactttggggacttggggggaagagtgggaggggaacgagggaaaagagacaacaaatacagtgcagtgtatactgctcaggtgatgggtgcaccaggatctcacaaatcaccactaaataacttattcatgtaaccaaataccacctgtaccccaacaacttatggaaaaataaaatattaaaaaataaaaaataaacttttagattcttctacataccagttaaaaaaaattggtgctgaaaacccattccttatgtcactgagctaatgaggaaggcaggcacacttggcactaggactggcacacaagcgtcatcctatacaattgatcttgatcatcttgcaccccctacagctcattctcctcacagcagctggagtaacttttagaaaatggaaattggacccactgttgggaccaaagccctccaaagacctaccatcactcttaaaatacaagtctttcttgccaacagaagaccatgcacggcccatccctgcttagtggctcgtttcatctcttgctattctcctcctcacccactctgttcccgccacactggacttgctgttccttgcacttgcaagctgattcccacccctccaggcttttgcaccagcagttccctccaccaggaaagctcttcccccaaatggctccatgctttgttcttttgcttctgtaggtctgtgcataacgtcacttcctccaaggcccttccttccctgacccctgtggaaacaagctcttcctgtctctctctctcatcattttttttttaatttgtagcattcatcactacctgacattacatattgatgtgcttgctgtccgtttctcccagactgaacttcatgagggcagagacttgtctcctgttcactgccatgttcctagaacccagaggagtgcctgatgcaaaggagatgctcatacacgttttgagtgaatcatctagtccttggcctccagcccaagtttgggtggccacacagtgaagacaggactgagaagcaggggtttgggagaatactaagccctgggttgggtgatgggaggagagaattgagaagccttctaggaggaccctggaggatctgagcagggtgatgggaagaaggggcatttctgacaagaagccagcccagcaagtcctggaggtgggactgagagcaccatctccccgggaagtttgagattctcacaacctccccgtacctgtacaggacagcaaccctgagacccggcgccccctggtggtcagacagtaacatgaacgaccaagtccaagtggtcaccatttattgagcacctcaacttctctgatcttccatttcctcccagtggtgccttgatgcgggggggatgggggggcgggggggaagggggctgattatattttcataggagaaatgggacatgaaagaggctaagtcaccgacaggctcacacaaccctgcctccagagtccaaggtttggggaacgcatccaacccctcctcacccgtgacagagataccaggagagattcgagaggggatgggtgggggaggaccaattccacgacctgtgatattcgagagctttggagggagccctcggtgtgaccccttccgactgggtgtcttagggccatttaccacttcaggctacagccagtgagaccgtggtggagacgaaatgagggtgcagtgcgtgctacacacgaagcgctggaagggaggcatcgtgacggcggctgtgaatggcgtgtgtccatcaagtcacgctccgcttaccccactgcgggcaaacaggaaacatcaggaatctgatgctcaaggagggtcaggaccatgctgagcgcacccagaaccagcagaggccctgggcaggaggtccccaaccaatccccactcgctcaagaatcacacggtgttcagccccctcctccctgagacccaggagtccacgaccccaggccctccttcctcagccacagatgcctggggtccccagtcccacttcttctaggcttagtcctggccctctcctctctcagacctaggatggtcccccagccccctcctccctcagagcctgaagcccagttcgagacccttcttccctgagacctcgaagtctggggtcccagcttcttcagggtttcaggtgaatgggcccccgtctccttcccaaccccacatggaaggccaggtaaggtaacgggtttattcacagtgtcatttacaggcagcccccaccccgcggcatcagatcccggcgggaggcccgaagtcgctagaaggtggggacggccttggaggcggggggccgggccggatccccgggcgtccccggcgtcgcctcctcgtccagaccccggcggcccttgccgatggccaggcggggccggccgcggttcaggccgtccaggagcgcgcaggcctggcagagcgcgcggctggccagcgccccacagcgggagcaggcgccggggcgcgggggccgcgcggccggggccagcgccaggcgctcggccgagtgcacgaggtccagcaccgcggacggccgcgccgcctccaggcgcttgagcaggtcccgggcgtggccgcggaaggcctcgggcgcgtagacgcactcctcggagaagtagtcgaggcggcggaagtgcgcgtacagcaccacctccttctgcgaggcgaactgcagcgggcggcagcgcggcagggcgcccccctcgccgggagagcccaggcccccgccccgggccagccgccccgcgtcgccccgtaggaagttcatgagcacggtctccgccatgtcgtcggcgttgtgacctggtggggagagaagggagcgggtgaggtggggcgcggagggcgctgctggccagggagccccccggggaaccaagggtccaccaggacccagagagagactgggaggagagacccacggagacccagggcacagtggggccgccaggacccagagagagacggcgacggggagagcaagccatggagacagacccccaaacatggtgtgacagccaggatccagagacagggagggggagagagagccatggagacccctagggcactgtgggcaaccaggacgcagagagagacggggagggcaagagcgagccatggagaccctccgggaaccgtgaagcagccaggtgcaggctgcaggtggacacaacaaaaaatcaaagagaaacataagctcccctggcgcaacttgggcgtgccttcatgtaccacccgcctactgcatagcggaccttatgctagttgccctttcatatagggagtaaaagtgcattatgctgctaataaccttatcagcctcagttaaaaccgtaattcaaactgtacacaaaaatcagaaggcatttaaggcatttaaccgagattctcaggagagctggaggggtaggcaggctgctgtctcccccaccgcctagggaatccatggcctaattctgggaacctgttaatatgtttggttgtaggacaaaggggaattaaggttgcaagttgaattggggctgctaatcagctgactttacaatagggacagaatggtgcgttatccaggtgcgctcaaggtaatcacaaagacccttagaggggaggagggaggcagaaaagggagagatagggccatggagacctttgaacatagtgggcagccaggacccagagagagatggggaggggaagcctgagccatggagcccctctggcaccataggacagccaggacccagagaccgggagagggagatggggccatggagccccctgggcactgtggtgcagctaggtggtggctggaggtggacacagcaggaattgagaggggaacacacacaagctccctggggaacttggggatacctcatttgccacccgcctactgcatatggggggtgtgagggcagaggcaaggttagagtgatgcaaacggtgtaggactcaaactgccatccttggctttgaaaatggaggaagagccgggcacagtggctcatgcctgtaatcccagcactttgggaggctaaggtgggagaatcacctgaggccacgagtttgagaccagcctggccaacatggcaaaacccccatctctactaaaaatacaaaaattagcaggtcatggtggcaggcacctgtaaccccagctgaggcatgagaatctcttgaacctgggagggagaggttgcagtgagccgagatcactccactgcactccagcctgggctccacagcaagactctgtctcaaaagaaaaaaaagaaaagaaaatggaggaagggaccatcagccaggaatgtgggcagcctccggaagctggaaaaggcaaggaaatggacccccttgccccagagcctccaggagaaaggcagcactcttgacactttgattttagcccggtgagacttcccagacttctatctacagaactacaagataataaatctgtgttgtttaaagctgtgaaatttgaagtaatttgttacagcagccagagaaaacaactggttcttgacacagagcctctgacaacccagactgtagtttttttatggtttttttttttcattttgttttattgtgcgtgtgtgtgtgtgtgtgtgtgtgtgtttgagacagggtctcactttagtgcccaggctggaggacagtggcacgatctcagctcactgcaacctctgtctccagggcttaagtgatccccctgcctcagcctccagagtagctgggaccacaggtgtgtgccaccatgcccagctaatttttgtatttctatacagacgcagtttctccatgttggccaggctggtcttgaactcctctgagctcaagtgatccacctgcctcggcctcccaaagcggctgggattactagcatgtgtcaccacccctgtaatcactgcagtgtttttgtgttatctttgtttagaagtaacagtgagaaatatttacacactggtcaccatgaaattgaagctaaacttgttctgtgtcttgtcaagttatacttgagtctatatcagtggttctcaatctgggatgagtctgccctccttccctcccccagagacatttggcaatggctggagacatttctgtgtgtcaggttgggggtggggcactactattaaatagcatctagtgggtagaggccagggatactgctaaaatcctataacacagaggacagctccctaaaaacaaactatctggccccaaatatcaatagggctgaagttgagaggccctggtctatatggtaaaaaacctccaagaacttggctctaattgtgtttgtagtaatggttacctcccaaagacctgccaagccctgtgaccttgagattgggcatgtttgctactgcaaacgacatctcgttgaatgtttattgacttaaagttgtaaaccacattaattaggggagactggatttgctccacaccttgtcattacaaacccacttaagagctcccagttttgtaataattattacaacaattattatactacgcctttgaaaatggagtgtataaacaaagggtagaaatcaccttgcaagtcagggatttttctggaaggcttcattacttttggaagtacaattaataagtgattctatcaaattaactttaaaatccgaggcagcctctcattctttttttttctcccccagctggaatcttgctctgtcacccaggctggagtgcagtggcgtgatctcgactcactgcaacctccgcctcccgggttcaagcaattctcctgcctcagcctcccgtgtagctgggattacagccgcccaccaccacactcagctaatttttgtattcttagtagagacggggtttcaccatgttggccaggctggcctcgaacgtttgaccttgtgattccgcctgcctcagcctcccaaagtgctgggattacaggtgtgagccactgtgcccggccgaagcctttcattctttccatacactgtctgctcttgtatggtaaggattattcttcccattttcaatcacagagatctagggatttctccaaagttactcagtaaggaaagggccacatcagtgaatgaagctcagtaagccttccccagagccagtggccctacctagcatggtggcacatgacagcctcagaactacttttgccttcatatgctttcagtgtgctgattctctccaaccatcatctctcacctccatcaccgcagctggcttcccactgactggtctcctcggctttgtccctgtccctccaacccaggttcctcgccatggcctgggtgagcttttcaaagtgaaactctcttcatgtcacttttactggttccgccacagcctacagggtaaggcctgacctcttccacctctccagcctcccctgcccttgctttctgggttccagccacactggacttcttggggcagcccaaattggcttttcacaggccaataacctctccctaattcttacccgctttacctcttcactgtgagccttcagatttcaaaaccgttccttgaccccactccctccacgtcatagggttctctgtgtgtacacatagtccataacatgtccatacatggtcaataacatgtataatgtttataattttgtacctgataaccatgcaaaggtaggaacttgtgcgtaactgtattctcagccctagcctgacaatgatgatgataatagcatgtataaaatgtgtaatctatattatatcatacgggttatgtaacataactataatatagataacgttatacttctactgactcatctaattgtcataacaagtttatgagctgggtaccattcatagtcctgttttagggatggggtgaaacagaagtacagagtggttaagaactttggtatggccacagttgggatccggcatatagcagaaacttagcatctgtttgttgaaggaatggatgaaaaagacagaataaaaaagttatcttccagcactttgggaggccgaggtgggtggatcacgaggtcaggagatcgagatcatcctggctaacatggtgaaaccccgtctctactaaaaatacaaaaaattagctgggcgtggtggcaggcacctgtagccccggctactcgggaggctgagccaggagaatggcgtgaatccgggaggcagaggttgcagtaagccgagatcgcaccactgcactccagcctgggagacagagcgagactctgtctcaaaaaaaaaaaaaaaaaaaaagttatcaaagaggagaggccaaccaagaaaaggaattaagagatggagatgctttttagagaaagagctggattctgaaaggtggaccataagagatcaagcatgttagaaacatttaaaaataagtaaaggaccagagatctccagagattttcacctcccacccctttggcaatctgtggagaccaagacggtggccaagacccaaaaacctttgtgatcactgcctggcccctctgtctccccagcgtcttgaacctttaaagggccccagccccaaactgcagcatgcgcccttccgcacctccgtacagggatcctcccattaagccaccagggtctcctcgccgccttctggagcatgcgcctgaatcccctttcaggtcccgcctcctcgcctgtgcattcgccccactgcctcggagagtgccgctctgcggcccgtactacgctcacctgtcacgatgtgcgtggctcccacgcggcgcgccccttcctccagcgcccggcgccgcagcactccacagaaggtgcagcaggagcggctgcggccggagccggctgtgctgcgggccacggcgtccatcgtccagcccccaaagaggtcttcgtaggccacgaccgtgagcggcagctcccagcgcgccgcctggcgccgcacggccgccaacgccgcgtcccggtagccaccgatgccctcatcgacggccacgagctgcagtgagatgcccaggcgcggcgccagcgcgcgcagcacgtgcgccagcaccgtggagtccttgccgcccgaggcgcccacggccaccaccgcgccgggcggcagcaggcggccggcgagcaccgtgtgcagcacctcggcctcgaaggcggcgcagaagcaggcaccgcacagcgcttggcccgagagcggacggcggagggcggcgcgtgcagcatggcaggaggcgcacggcggggcgggcattgcgggaggggtcggcttctcctagacagggagagagaggaggtgggttacatatggattccggattgcagggtccctgccatcggggagattgtctggattgcacctctgcccggaatagaccagggagacgtgtgcgcgagtggagtagcttcttctagcgctggggataggatggttataaataggtccggtgtaaggaagccactgccttagggaaggcttcttggattgcacccattatgcaagaagaagagaagtagcttaagaagctggcttcatgggtaaagagagggagcgacaagcaggttatacccaggattaggttgtgtcctctccagagggatgggggtgtatattaaggcccatttgtcacaacctccagggaggccacccttgttacagtcctgatcaggacaaggtaggtatcattggcctgggccaccagggctgttaaaagcccttgggaggtgaggggtttttgactctaagggcagagggaggccaggggactgaagctctgtgcagcgggaggtggaaaacaggaaaggccaactgattgcactttgtagggtgggatacggtctccaggaatgggttctgattgcatcctatgaaaggcagggtgatcaccttctccagggaacacaggcagcctggatcacacctctcaggagaccagctggggttgcacacattttgagggtgagaaaatgggtgggcctccaagattgaactcaaccctgctctggtatcagaatgccccacaagcttctgtgctctcaccaagacatggatcggcccatctttgaccttcatctgttatctttcctacttcattcttccccacccagcctagactccaaccctccagtcaaatcctggtcctgcctgcctggtgaacccataaaaactccccaggctcagttctcctccccaagccaccatcacctccagcctggactactgtagtcacctccttgccattcagagcaggtcacgctgcttctaggatttaccacaatgtgtggaattattttatgtgactatatatttaccatctctaacttctatgagggcagagaccagtaccactcagatgtctaataggcatctcaaaacccaaattcctgattcttctaacccagcgtgcttctcctggagtacagggcagctccatccttctagctgctcaggccaggagctttggggtccaggaccctggactgctctttctctcactgcacttgtcatgctcccagtgggtggcaccaaactgcaatgccaagtccggaccttttcaaactccaggtacctaaatgaaatttagcaaatcctgtttgaatgtagtttcaaaacagccaaacacttaggaccgtctccacggcagcaccctagtctggtctgtctctctcctggacggctgcatggggctccccacaggtctcctgctcccgccttgcctcctctacaaacactccttcacataacagccagtgggatcatgccctgaatcttctcagcatcctcccctggatcccatctcactttagtataataactgctaatggccgatgaggccctacatgtgtggctccttgtttctccaacctcctctccttcagccttgatgtcgtttactctgacacctgaggaatactcctgctccagatgtttgcactggctctcccctctgccctgagtactcttcctgccactgagcccaagaagcagcccttaggactcatctgcagtgaccgtcgggaacatctgtcacaggtgagcagcaactcttggaatctttcttcccccgacttttgactcactccttctgtgctcctggatttcctgctcaattctcttttggggacgcctcttcatgtcctcaggtcctgcctagcacccatctctttccattttttaaagatttttaatttaatttaatttaattttttgagatggagtctggctctgttacccaggtggaatgcagtggcacaatctcggctcactgtaacctctgcctcccagggtcaagcgtttctcctgccttagccacccgagtaactgggactacaggcgtgtaccaccatgcctggctaatttttttttttttttttgtatttttagtagagatgcggtttcaccatgttggccaggctggtcttgaactcctgacctcaagtgatccgcccgcctcggcctcccaaagtgctgggattacaggcgtaagccactgtgcccagcttctttccattcttatgagcgcctctgaatcatgatattcagatgtccctcctggctggtcctccacatggctggggcaccttaaagatgttcagaccctaagcgcccagacaacctatttcttcctcgaaaggcagaaacctgttcttgcccatctgttccctctcttctgagagcagccaccacctttcatccagcccatctgcaggacaggacgtaacgtcaccctggactcatctctcctcaccccctaaatctacagtcacccagtcctggggggtccacgtcctgaggaagggagacgctcgcaggggacaaggctgcacaagttagcagagcctcataggccatgatgtggaattttaggtttattcaggaggagatgggagccttgggaggtttttgaacagtaaagtggtatgatctggcatgttttaaaaggattcctagactggtcaacatagcgagaccccatctctaaaaaaataaataaataaattagctgcacctggtggcacaggcctgtagtaccagctactcaggaagccaaggcaggaggatcacttgagcccaggaggtcaaggctgcagtgagccatgatcgcaccagtgcactccagcgtgggtgatagagtgagaccttgtctcaaataaaaaaagtgggattcgtttggctgctgtgtggggaggactgttggttgtcagggacaaggacagaaggctggaggtcagcacactagacaggagtgctggcagtagaggtgggaagaagtgaaattttggatctattttgaaggtggagcccacaggacttgtataagactgattggagtggggactggggcaacgacgagagaaagtgatgaagggtaactttgaggttctggcctgagcattggagggacggtggggccattttgtgaggtgagaagaccaggaattccatttggccacgtcaggtttgacatgcatgttaagcgtcttccctcaaagactttatggaccctcgtcactgagtcgagcgcctccaccagggccctcagagctgccctgatcctgactagctgtcactggtgacaggtctgtctctctgcttcaaggcagggacagggttggtctggtgccctcgctcccgccgccctgcgcagagtcggtgctcagtaagtatctgtaggatgagggaataataagtgctcccagaagagaggccgcggaccccagggatgcctctggattgcagccttgtcaaaaggacagataatgtgtggcatgggggcggggacaggcagatagtaacataggggcgggggcaagcagatggtcttatcctgtcttggggaagggagtggcccggtaagagacaggccggaccgcagcgttcaaagtgggaatcctggctacaaggcctcagggacacgggcgctgggaaatcacagaggccttacgctcgaagagaccctcaaccctcccacggcaccgcaacaaagagccggagtccacatgccgacccaccgcaggaggaaatactcacccgggcagaactcagtgctgggatgcccacactgcccaccacgcggaagcctggcccggaagtgactccgagactaccactcccataaggtcttggggctttcttgcctagaactcccagaagcccatgcgacacttccgctggatgcgcctacggctccggggtcccgcttggcctacaactcccagaaacacttgcattgctctttctgccgctcccaaaatacactgctccccctccccccgcgtttactttctgcgcctgcgcgcggccgcagggagcggcggagctgcgtgtactgttgtcatggcagcgcgctgtcacccggcaggttgctggatgggcgaagtagttgtattctgattaactgattttgtgggattattataggattttaaggggattacagggcctatgatttctgccctttgaggcggggttgcgggtgggaattgaaggtggaactgcaggggttggtcgctagtgtaaaaggcgcagatagcgcatgcgtagagcagacttcgaggattggagtggaactccgcgcgcacgcgggggctgtcgtgatgcgcgtgctggagacccagactctaaacagaaggatccaaagacccttctcacctaacccaggagcccagaggctcagagactcagacccttgagactaagggggttaaaaacgcagacccctggcaccaaagcacctgagagaaccagtagacctggagacaaccgtctgcaccctagacacagggatctggaggcctccaccctccccacaaggcccaagggtcttgaagaccccggtgactcaaataccggggcacaaggagtttaaggactcagatatctgagacccttgagatccaggtccccaaacctaggtcctcgaaaaaactgaggctcaaaattcctctagacggcgcggtggcttacacctgtaatcccagcactttgggaggccgaggcgggtggatcacgaggtcaaaagatggagaccatcctggccaacatggtgaaacctcatctctactaaaaatacaaaaattagctgggcgtagtggtgcgcgcctgtagtcccagctactcgggaggctgaggcaggagaatggcttgaacccagaaggcagaggttgcagtgagccgagatcgcgccactgcactccagcctggccacagagtgagactctgtctcaaaaaaaaaaaaaaaatcctctagattaagggaccaccagagccttagactgagatgtggagatgtgcagagagccccaggatgtgtaggtctacggccggtgatgacgtgagaaggaaccccatgcaccctgtagcccatttttttcccccataacaggaaaccatgatgccttcctttcatattaaatgagctccgtgaggtcactcttaagccttatcatgggccagttctgttcatctgtgtgcgttggttcatttgttgaatttatttcctgaggtctccttgtgccaggctgcccctgggctaggtttaggtgacacaaatgaatcagacttggttactgtcctctgagcatcccccaccccttacaccaccaccctgtcctcctggtgggggagacagggacttagtcaatatggagtgataaagcttgacatggaagtgttaagagccttgaaagctcaatttcaatcactgccagccagggtgtcagaaaaaaaaaaaattcaacaaaggctgctatgtgccatgcatcatctcagtttgttcatctgtgaaaggggggcaataatagcctgcctcataggatttatgcgaagtcaaattgaattaacaacacctctaaagaatttagaacagcttctggcacatagtatgtgctcaacaagtggttattattctcatctcaattctcataacattaagattatatgttacatatgagttgggtacaactgtaattcttcttcttctttttttttttttttttttgagatggagtctcactatgtcacccaggctggagtgcagtggcgcgatctcggctcactgcaacctccaccttctggattcaagtgattctcctgcttcagcctgctgggtagctggaattacaggtgcgctaccacacctggctaatgttagtattttcagtagagacggtgtttcaccatagtggccaggctggtctcaaactcctgacctcaagtgatcccaaagtgctgggattacaggtgtgagtcagcatgcccagccttgtaattctacttaggtgaggatcttgaagctcagtgatgtcacttccctggactgcctgactctacagcaggggttgcaaacctttcctgtaaagggccaggtagccaatattttaggctttgtgggccacagggtctttgtggcaactctgctgttgtatgttgaaagcagccattgatataagataagcaagtgagggtggctgtataccaataaaactttattgatggacactgacatttgaatttcatgtaatttgcatgtgtcaggaaatattcttcttttgaagaattttgaagattttacaccatttaaagatgtaaaatcatttgtagcttgtgggccatgtaaaaacaggcagcaggcccgatttggctggtggtctctggtttgtagctccttgctcaaagcctgtctccttagtctccaagctgtgcttgctcctggaagaggtgtgaagtgtggcaaaggaggttgagaatttgagggtcgaaatggccttttaatacagaagaaatcgcctgagcaaagaaagatcttgtggcaagaaagcacagggtgccttttgtttgaatgcaatttatgttatctaatcaggttatgcacttaaatgctataaaatggaaacagtgcatagactctacagtgaagtctccctgtcgtctccccccacccacccactgtctagttctcctcctcagaggcagcctctgtcctgcaacaatgtgggagtgcatgctgaatcggggtgtatagagtttccccattctcctctgtgggaccaggataagagtgggatatttggggctccagagatagatgggaaaagaggtgaggtcagccatgagaagccctctcactcccagccctctgctgtctggtttctttcctgtctcccctaacacagtctcccgatcaacaccagtggcctctttattgacaaataaaggtctaacctgggctctacctacttctgagtctctttgccctgaccacaaaatctaccctccctggtcctctttctggccaaaccatgtcaatcaacttgccaggagccttgtactccacagcgctgtcatttctctgcaaactccccaggtgagctcatccactcctgccactcccgcaacttccgtctctgccctgatgcctccccactttcctgcatatctccactgcatcccgagactcggacctgcacagttagcccctggtggtggcactggcatgcttcagcctctaggtgaggatcctgaatcacttcgctgactctttttctcacccactgctccccattgttcagtgaaacttgccagttttgcttcttgaaagtttctcagaccattcccttcatccttgtggccctgccttggctcagctcatccttttttttaaattattcatttatttatttattttttttgagatggagtctcactctgtcaccacagctggagtgcagtggcatgatctcagctcattgcaatcttcgccttccagcttcaagcaattctcgtgcttcagcctccggagtagctgggattacaggtgtctaccaccatgcccaactaatttttttatttttagtagagacacagtttcactgtgttagccaggctggtcttgaactcctgacctcaagtgatctgcctacctcggcctcccaaagtcccaggattacagatgtgagccactgcgccggccgtttcttgcctggactctctcaccccaacctctaatcccttcattcctgaatcctcccacactagccccagatttaaccttgtctctccccttctcgaaactcttccatggctccccattgccatcaggctttccattgtcaaacctctgcagactgcaacggaggtgctgcatgatctggtccctgcacacccttccagcctcagaatgccttgccatctccaggtcatctagctgccatcctaagcaatccgcgtctggtggaagatatggtggctgggctcagctgtctctctccagctctgggagctttggttcctgcagcatcaatgtgcatctctgagggccatttcctatatctggtgcttgttactggcagcacttgcttccccacccctcgaagggctagaagcttccctgggtagaatttctgcatgaagagagttcgttcacccgtggagcctactgaggaacgggatttttgtctgtggttggttggtttgtctgttttcattgtagtgtatcaaacagtccttattttgccctaagtccagctctgtcccactgccttcttgttagtttttgcatctccttactaaatggtaggtctgcctgggttcccacagcagtgctaataaactttgttggccagaggaggcaccaggaaagactctctgttggcaacactctctgaagggccctctgtttctctttggccttgtctctcgttctcctcatcccaggagccttttatgtgagtttccacagctcctcctcgcaccctctcttctctctgcacttctcgtggctccccccgatgtcttgcacaccatgctgttcatcccaatctgctctgagccccagacaaccacatttccccccttctcagtgatggaaccatcatcattatccaaattaggattctaggagtcagatagatatttctctatcacctaccatatcctgtttgcaagatgtcttgcaaacttcccttcctggaataggctcacttcactcccccttcaacatccccatggcctctgctcctagtcatttcatcctcttcctcttctgctcagacctccactctgttttcctctccaacttcttggcctccactctcctcctctccctaaagtctccctcacatcaccccagagggataccttctcccaccaagagctgactctgcccctcccccttgctcttaatccttccatggctccccagtgccctcaatataaagtcaagactttttttgatatgtaagcctgcaagatacggcttgcaactattcttccagagtcatcatgccttgatacctacctctggggtcatttagctgactacctgccccacatttggacgtctctgaacatttgtcacctggtagcccaatccttaagaggggagaaacaggcctgccagtcttgcccttcccctttatctgtttgtgctcagctctggggccctggaaaatgctcctcactcctcattcccagggcaagtctccatctaacatgtagtaataggtgaagacatttttgtctattttgttcaacaagaatcatacctgacatataataaactctcaatatatgtattcaaaaattaaaaaataaagctgttacttgtgaaatctctgcctgtagcccaggtctttgttctgaccccagcaccctcctaatggccccgttgtctgtgaaggcattttcaatgctctccactgtgctagatggtgagcccatagggacagaaattgggtttgttctgactcctagagtgacttggtaaatattgttgatataggataaggctcagagaaacctctgtctcagtttgataggaccccgagaaacaaaactggcaagttggagaatctagctcctttacagccagcagcaagtgaggctactctttgtcctggagggagacattaccccatccctcagggtggctccctgcaaacacaacctgagaactaggccaggtaacgagatctcagaccatcatgttttgggcaatacccaacgagatgtgtaggaggacgggaggctcatggagatctgtccttcccaacaggctgccctactcttcttagatgatgtgggaaactgcaaaatcctctcatcaaattctcttttaccagcatacacaaagattccatcacttgtgatcgacgtcttagtcagtaagtctggaccattttgactggtttccagtcagaaaaccaggaggatgtggtgaacagagaaaccccagtactcacatttcactattctttgctttctctcttcatgctttgtttgaagaagttgcaaaatgagatgactggaagaaagggacatgatagctaaataaagcttccttttcttggtcaggcactataaatctattgcactttctcctgtctaacagaagtcaaacttttcttttttttgagatggagtttcactcttgttgcccaggctggagtgcaatggtaccatctcagctcactgcaacctctgcctcctgggttcaagcgattctcctgcctcagcctcctgagtagctgggattacaggcgcccgccaccacacccagctgatttttgtatttttaatagagacggggttttaccatgttggccaggctagtctcgaactcctgacctcaggtgatccgcctggcttgccctctcaaagtgctaggattacaggcatgagccacaacacctgaccttactattgtaagtattagttctaaaaactggcggcccctcctctgagtccctgtcactccagttctcaatctctctccatatggctcaatgctctcctggaatcattgtcccttcaggtccccattaggatcttcagtcttaggcccattttttccccctatagtttttcctatagtctcattatccttaagtgaacaggaacaacaggacatccagcagagtccctgaggatgaactgggaagcagagaggaagaacataagagaagctcggcctactgatgacagaatctgttgctccccaaatccttttctcttgggcaagccagaccttcccaccagcccatgttatatggctgcccttttggctcgaggcttaggtttcatgctcgtggggtcagacccctctgcagagccgggtaatacctgaactcaggagctgatggtgctgcagttccacggacggacagcaccatccctgctgcccggggcttaccaggtccaccctgtcttggggggacagctatgactttgtgtgtggcccctcctttatctgcatcccagaaaaattctttcaagataaggttggagggaggagagagttcactatatcacagcacataaaggatcggggcagatacacatttctaggtcctcaccctacaatcctagggatgtcacctcaactaccctgatgtgtgatgtcttctgaagctcacgtgatcaccagcccaatgtctcctgtggtggtgcagcagggtgggtgggggagccaggattcccagtccctgtgcccaacacggggtccaaggagggttcaggacttgggatacttagcgcctggttcctggggaccagactgaggaggggacaggaggaattcctcaacccgccttctttgctgttttggtgactgtagaaggatgcagggccaccaccccacttcacctcctacaccgatgtgggaactgttctatttctgtaccagacactccagttttgttgttgttgtttgtttgtgacggagtcttgctctgtcactcaggctggagtacagtggcgccatctctgctcgctgcaagccctgtctctcgggttcatgccattctcctgcctcagcctcctgagtagctgggactacaggcacctgccaccacatccggctaattttgtttttgtatttttagtagagacggggtttcactgtgttagccaggatggtctcgatctcctgacctcgtgatccacctgcctcggcctcccaaattgctgggattacaggcgtgagccactgcgcccggctgagacactccagtcttctagacatcattgcctttcaaggaaacagcacaggtaagaatcttccttcttcggggctggttggaaatggggtcgctgcccacccacatcagaggtggattcgaggctcatatgatgggaaagatgagatttgacaggagaagctctcattccaccacagtcaggcttttgcccacaaaccttcatttaaaaaccatggtcagtccaagatcaccaccaccattctctcagacctcacaagttgaagccttggaaactgagaaatggtagcatcagcaccaaatactcaagaggacagatgccggtggggaatcccaatcccccaggcttctgttctggacctggagcctgagacctctcgggggaaggggcacctcaaacacttgttcttgtggatcgactgtgtctctagttaatagattacaagtgactttatgcaaatttgttagtatagggaaagaaatgcaggctttagaataagagaaacatggattctatactgattcctccacttactaagaggttgaaaatgggcaagtcactttacctctctgtgccgcagtttcctgcttgtaacgtgagaaataacaagccccagcccacaaggatggcgtggcacatgccaatcaccatacccaggtcctggcacaaggggcgggttctgtgtgtgctggtttcttaccccttgaatagtaaggtcctgggatcaacttgtcctgatgctaggactgcaagttccccagtgcattaaatgaatgcccgacatttaaataaaaggagatgaaacttcatcagcaatgtcaaaaccagcaaatgaataaaacatcgcaccacacacttcaaaaggggatcaagtaggaaggacactgaaagatgtggggtggcactaacaactttctccccctgaatggtggggaggagtccccagaagcagctatggaagaaaatttgggctgaattaaccctgagaattttccaagatgcccccgcccccatatgcacatgtgcccactcatacgagtagacaaagctggctaaaataaacaaaaagaattccagagaagaagccttacatactactggggccatatcagaggataaccagaagttaacatcttttaacaccctgttttgagttgaggttattgagaaattccactctaaacaatacccaacataagtgcatatacataccagaagacatgttcatagcagactcctcataatagccccaaactaaaaataatctcaaagtccatctaaaaatgaagagttatgtagtgttcagtatatgcacagaatggagatctttcagcagtgagaatgaatgaattattgacaggtgaaacatcatggacaaatttaacaaacagagattgagcacaagaagccagatacaatggccgggcgcagtggctgactcctgtaatcccagcactttgggaggccaaggcaggcggatcacaaggtcaggagtttgagaccagactgactaacatagtgaaaccccatctctactaaaaatacaaaaaattagctgggcatggtggcgggtgcctgtaatcccagctactttggaggctgaggcaggagaatcgcttgaacacgggaggcagaggttgcagtgagccgagatcgtgccactgcactccagccggggggacaatgcaagactatgcctcaaaaaaacaaataagtaaaaaataaaaagaagaagccggatacaagagtacacactggccgggcgtggtggctcatgcctgtaatcccagccttttgggaggctgaggtgggcggatcacaaggtcaggagatcgagactaacctggctaacacggtggaaccccgtctctactaaaaatacaaaaaattagccgggtgtggtggcagaggactgtagtcccagctactcgggaggctgaggcaggagaatggcttgaacccaggaggtggagcttgcagtgagccgagatcacgccaccgcactccagcctgggcgacagagcgagactccttctcaaaagaaaggagtacacactgaaagttacataaaaacacaatacagacaaaactaatccatgataataggagttatactggtgactttgcaggcggggtaatacctaggaatgggaactggtgaggctcctgggtgtaggttgttgttacaaaaatgtattcatttcatagacattgatcaggcatacctttataattggaacagctttctccatgtatgctttgcttcaaaatcttttattttaaaagactataagaggaagctggacacagtggctcatgcctatagtcccagcaatttgggaggctgaagtgggaggatcacttgaggccaggagtttgagaccagattgggcaacatagtgagatctctgtttcaggaaaaaaaaaaaaattagccaggtgtgagggtgtgcacctgtagtcccagctactggggaggctaatgtaggaggatcacttgagtaggtcaaggctgcagtgagctgtgatcgtgccactgcacttcagcctgggtgacagagcaagaccctatctcaaataaaagactataagagaatacttcacatatatatttgctaattaattttaaaatttacataatataaaaagattattgcaaaaatataaataactgggactgtctcaagaaaaaaaaaacccaaatagttctattgtcttagtccgttttgtgttgcaggttaaaggaatacctgaggctgggtcatttataaagaaaaaaggtttatttggcccgtgattccgatgtctggaaaggtttgagattgggcatctggtaaagtcctcaggctgcttccaatcctagtgggggatgatggaagagggggctgatgtgtgcagagataacatgataggagaggaagcaagagagagggagggaggtgcctgactcagagcttgagcaccgactcactggcaggcaggggcactcatctattcctgaggaatccagcaccatgacccaagcacctcccatgaggccccacctccaacactgggatcaactctcaacaggtttgagggcacaaacctccagactacagcactgatattcatataggaattcattcagtagcaaacactgatttccagggaagaaattcacgggtaagttcttctgaatatgcaaggcagaaatatttccaggttttcatgagcacttccacatgtggaagtctttctgctggcgaaagacacattcgccagcaaactctgaggagtcttttgctttccctagacctcactgaattctgcacagcagggaagaggggaaggctgatctcagaaaacctcccatctctggcagtggtgggtctgacactgcacttatgtgcacgattaccattttgtccaaaccccgtggcttcctgttggggtttacccttgtttctcccagactattcttcccatacggagggactcttgtgaccagactgtcctggggcagtgcctggtgctcatggctcaaggcacagttctgctggggctggtgctgctgccatccaggtggtgagaaagtaagcagacccagaggggtcctgagcggggagcggggtcagtgtctgagcctctccttctctccccaggggctttggcttaggatccaggagatggccttagagtgcaggagctggtgacggtgcaggagggaatgtgcaggcatgtgctctgcgctgttttctaccccaagtattactgggcaggatccggcctagctcatggttactgccaacaggatgaagccactcctggaaggaacactccagtggctacaaacaaccccaaacaattgcaggagaagaaccagggccagttcacctcgttggtcatccccagacctacagctgctccctgaacctcagagatgccaatgaggcggatacagggacgtacttctttcaggtggagagaggttattacatgaaatacagttacggaaatgagaagttgttcttgcatgtgacaagtagaggaaagtcccagaaaaggagctctttctcctcattcggggtcatgggaagcattcaggggccctggggtggggctctggcacagggagtgcccccactcccagaaacaggaatcagcccctttctcttttctagtgctgacccagccacctgagatccatgtccagaagagctgcaatcaggtgaccctggaaatctgacttgcaccgtatcatgggccggtgagaagggaaccccaccaaatttcttctggataagagaagccaccaattttacagtctccaagacccctcttcccgaccagtcctcagttctcagccttatcccacagccatgtgaccatggcagcaacctcacctgtcaggtgaagttcctccgagctggtgtgaccatggggagaaccatccagctcaatgtctcttatgagtggtggatcaggacccccatgcccagggccctgagaacaatgggtgtcaggagggaagggaggtcagaatcaggaattcttttttttttttttttttaagacagagtctcgctatgtcacccaggcttgagtgcagtggcgcaatctctgctcactgcagcctccgccttccaggctcaagcgatcctcctgcctcagcctcccaagtagcagagactacaggtggcaccaccatgtccagctaatttttaaattttgggcagagatgggttctcactgtgtcacccagtttggtgttgaactcttaggctcaagtgatcctcctgcctcggcctcccaaagtgttgggattacaggcgtgcaccactgtgcctggccagagtatgagtttttttgttttttgttttgagatggagtctcgctctgtcacccaggctggaatgcagtgacatgatctcggctcactgtaacctatgcctcccgagttcaggtgattcttatgcctcggcctctggagtagctgggattacaggcacctgccaccatgcccggctcacccttgcctggctcagctttgagctctgtcttgatgcctctcctactttctgccccttgatcctcctcttatgcatggcgtctctcttcccccatttaccccattcaggatgcagcacttcctccaaatgtcacccttttcatccactgtactcatgagccagtgggtgctgtaacttcccttcctgaacaatgtctcccgtcatgccctccttgcttagtcccctgtcctccatcagcatgaccaggccctttgctgtcttttttttttttttttttttgaagatgaagtttcgctcttgtcgtccaggctggagtgcggtggcaggatctcggctcactgcaacctccgcctccttggttcaagtgattctcctgcctcagccttctgagtagctgggattacaggagcatgccaccatgcctggctaatttttgtacttttagtagaaacaacttttcaccatgttggtcagggtggtctcgaactccttgacctcaggtgatccaaccgccttggcctcccaaagtgctggggttacagatctgagccgccgcacccagcctctttgctgtcttgatcattgttccatgcccctccccagcctcccatcttcccttcatgctgtgcccctgatagcacaagcccagaaagaccttcctgtacccagtaccagccccaccccttcctggcccagagtcccctgtgactcctcggcaccctcagtctaagctcctcagctggtcatgccccaacacctccatgtccccttggaagaccccagatatatgtgcaggtctcttcatctgccagactgtttcagagcctttgcacatccctcgtccttcacttgtgatgcctgtctgtcttgcgtcaatatgacccactcccccttccaatctcagttcagcctccttccctccagggtctgtcagctagcgtggactccgggatttgtgtacataagagcatgagccgggccaggcttggtggctcacgcttgtaatgccagcactttgggaggctgaggtgggcagatcacgaggtcaggagttcaagaccagcctgaccaacatggtgaaatcccgtctctactaaaaatacaaaaattaacctggcgtggcggcacatgcctgtaatcccagctactcaggaggctgaggcaggagaatcgcttgaacgtgggaggcggagcttgcagtgagctgagatcacggcactgtactctagcctgggtgacagagcaagactccatctcaaaaaaaaaaaaaaaaagcatgagtcaaacagtcatgtgtcttctgtctcattccgaatgggaggtaagggagaaaccgacctctcagcaccactcttcctgctttctctgtttttttcgtccagccccaaagaccctgaacaatggtacaccactgcctgtcctggagggagagtccctgtggtctgtgtggctgacagcaccccacctcccaaccccgcccggctgagctggtcctgagagggaagaacactgaattcctcccagctctcagcacccgggggcctggagctgcctcagataggggctgggacggaggagcattgacctgttgggctcaccacccactgcgatttcagcacatttccctgagcctctgtgcagagtgagttgcaggacagctgctgaggcaggcagcctagtcgggtgtttgggctgtcagaggggtggaggcctgggaacagaatctcacacgcttctaccctttcccaggaagcccctctggctacagatgtgtgagtgaaaagcaggagggcttctggcccctggttctcacctgatcagggggccatcctgggcactggcttccccccaacccccatggcctcacctggagctactactccaggtgagcaggcctgctcttttctagggaagccgaaggattgttccccgagttccaggtggggctgagctgtcctgtcccgcctgagttagaattgaagtggccgatgctaatctgaggcccgtgttggctctgcaggtgtggagggccccaggggagcagtgctgagaggcctgactgagcccctcctgctcaagacagaactcagatgtggacacccagccctgcagaacagatgcaggacaacactgtcagccatggctcagcccttctgaccattgcagttgagatgctgcaacttcccagggagcgactgggcaaacatgggggcctgaggtattcacggcaacgtgcacagatgataaaactacctagaaaagcatggagaccattagcgttaaagtgaggctggggctgcttcaggaggaagtggggtgtggctgacaggaagtggggtaacaaagaggaggtgttgcggcatccccagtgttctgtttctctaagcatgttcatatgtgtaaaccgctgagattttttcttggggggaagacatttttatctatatggcttatatttctcccaaaaatatttctagaaaactgacatcggtctaaggaggctccaccacacaggatactcccagttcctcccagcccagccacacagttacaaaaaatcttctgctgaattcaggtgcatgtttcttctcccatgaaatcctgcccatcgcggagggtgcatgccccggggctggtgtcctcactccacatctcctgttcaccgggacccctgggagcagagcttgcagaagcaaagccccagggccagctgatccctcatgttctggagtaaccagggaagtgtggctgagcgagacatcggtggtgaagaaacccttcgtggtgcagtgaggaaaggagaaatatcttcccttttgaaatctgccccttttcttccgaatttcctcccttccaagccccacagtacaacagtcacagcctcagtttcccagacctcctgcgagccaggctcccctctgtgtccttggcgtgtatcaacacatagaatcctcacctccacagccccatgtccctctgctcagtcctcctgagattgaacccctgacctacgggagagtgaccccatcctgcctgtgccccccaactgaagctcctgccgtggacagctcagacgtcaggagcctccatgtctcccctccgcacagtgaccccttggggacagtgtccagctctgctgtgttgacctcgttgtgcagaaagggggtgcccacctcgtgcttgcttgggggggatgagaggctgcctgctcaccccacctgcacccccatctctcatggccccaagtcccacctctgagctacgcagatatccacagcctctgactcaggggtctggccagatgggactcattttcaccctgcagaaaatgtcacctaaggggaagggcattgagagggaggcaggaggtggggtgggccctgcatggggtgggaatctgggtgagtctgtctcccgctctggcctcagggacccaggagtgaacatggggtggtggacggtggatctcccagggctgacccgggcctgacagtgtctgggtgtaaagttcctcctctgaggaggtcactgttccgacctcgcccctgtcttcctgtagggcctcctctaagtcttgagcccgcagttcctgagagaagaaccctgaggaacagacgttccctcgcggccctggcacctctaaccccagacatgctgctgctgctgctgcccctgctctgggggagggagagggcggaaggacagacaagtaaactgctgacgatgcagagttccgtgacggtgcaggaaggcctgtgtgtccatgtgccctgctccttctcctacccctcgcatggctggatttaccctggcccagtagttcatggctactggttccgggaaggggccaatacagaccaggatgctccagtggccacaaacaacccagctcgggcagtgtgggaggagactcgggaccgattccacctccttggggacccacataccaagaattgcaccctgagcatcagagatgccagaagaagtgatgcggggagatacttctttcgtatggagaaaggaagtataaaatggaattataaacatcaccggctctctgtgaatgtgacaggtaaggcacaggctccaggaaaggccacagggaaaggtcatgggggcggcagggaaaggctgggatggagcccctgccccaggagagggcttagggtgaagcgagttggctcagggcaggagctggaccagagcctgagctccccccagggctgcaccatggatcctctgacctgatcctgagtccccctctcttcaccagccttgacccacaggcccaacatcctcatcccaggcaccctggagtccggctgcccccagaatctgacctgctctgtgccctgggcctgtgagcaggggacaccccctatgatctcctggatagggacctccgtgtcccccctggacccctccaccacccgctcctcggtgctcaccctcatcccacagccccaggaccatggcaccagcctcacctgtcaggtgaccttccctggggccagcgtgaccacgaacaagaccgtccatctcaacgtgtcctgtgagtgctgggccgggacgcctgggtccctgatggggtgagcgtcaagcctggacactgggtgctgggtcccggaatctgggctggtggtggggtcaggaggacactggctctgccttccctgtttatgcggctcctggggacagacagggccagtgtccccagccctcacagtgatgcgggtctccatgtctttctgtcccagacccgcctcagaacttgaccatgactgtcttccaaggagacggcacaggtaggatggagctccctccctggggctggaggagcagggccttcaggtcaggatggggctggcttattcctcaacctggactcactttggcaaacagggatgtccttgtgggtgaactcagggcccctctgtatccttaggccccaaggccacttgttcccatcctcccatcacctcccttggactcccccacacacccccccctcagcctcaaacaagaagagggtggcattcacacagcaggaccaggctttgaggctccttctcatgtatctcctgaatacatctccacccttatctgtttatttctgatagttctgatctaagtacttctggacaggtgataaatgtccatgggcaaaaattcaaattgcagagcaaaggctctcctccgatgcctgcccccctccccagaaccaaccactgtccatccaggctgccctgagtctcggtttgtacacctggaggatctcagaggtggtttgacgtccgtagtgagactgtccgcaccctcctctagggctgtgtgtgagtccactgcatggatggactctgattttgtggcatctcctaatggaagatcacggcactaatttcatcctacggcaggatagaacaatcttgtatctacttccacaggaatatctaagcctgtgggttaagttcctaaaagcaaaatgtagctacattatatgttctttcttattttgaaagataagcccaaactgttctcgatgaagcggggagaagtttacattcccagcagtgagtggtgaaagtgtgtgtttccagaacttcagtctatgtctgtgtgtcagttgctgtcatcagtctctttctgtatccttcctttttctccagatctatgtatctctctgaccctctgtctctttttctacagtatccacagtcttgggaaatggctcatctctgtcactcccagagggccagtctctgcgcctggtctgtgcagttgatgcagttgacagcaatccccctgccaggctgagcctgagctggagaggcctgaccctgtgcccctcacagccctcaaacccgggggtgctggagctgccttgggtgcacctgagggatgcagctgaattcacctgcagagctcagaaccctctcggctctcagcaggtctacctgaacgtctccctgcagagtgagtgcaccagtatgctggggaggggctggagaggagaacacacctcctccacccttagtaactgctgagcgtggaccttcagagaggagctccgctctggtctgtgctcagctgtgaggtctggaacttccctgggacccacagcaccactgtcctcttcctgccagggaagggttgtggggtggggagagggcaggagtggatctcagaggggacaggatggggccggacaggtgtgtttagggagacaagcgcctttctttgcagggctgaactggagtcacacaactgagatacttgctttgagcatcaaattaaaaaaaagaaaaagcccagcaagtcagcaatcaaatgaaatcatattgcaatgcaataatcttttaaaaaaagtaaaaattgaatgcaaaacaaattcattaatggataaaatattaaaattgtgaaaaaaaaccccaaaaggaatggctggcacttgcacgcctcactggcctcaggaagagtctctccatgtcctgctctctctcattcctgttctttgtgtctggaaaggggaagtggaaatagaagtctaggaccctacaggaagtgggaggagaagagacccaattctctatgatatatcacaaaaataactcccatctgtcaacaggcaaagccacatcaggagtgactcagggggtggtcgggggagctggagccacagccctggtcttcctgtccttctgcgtcatcttcgttgtgtaagcatggaccctagagagggagggagggagagccctgggggaggacaggctggaagctggatccctgaagccagagctggagggacctggatgggtcaagagcttggggcaagaaggaggtcacaggtgcatggtgagaattccatgtgggcctgtgtttgaggagctttgagtctgtggcaaaccttggtacccactgtccaggagaagagagcctctgttctcaaccttggggtctctaagactggaccactgctttcccacctcagtcacccctgcagtcccttaataggaaacacatgggggtacctggtctgcccaccgcaccccaatctgaccacactgaaaggctctctggtctcttcactcagagtgaggtcctgcaggaagaaatcggcaaggccagcagcgggcgtgggagatacgggcatagaggatgcaaacgctgtcaggggttcagcctctcaggtgagtgatgtggactctccacagccagcatgtagcctggacacctcccacaggatgacccccaggactaatcagctgggcgtagccaaagttacctcctctctgttcttcctttcttctctgtagccccaaatcacaatgtttggttggtttcctcccctaagaacagcttttattgtctctgctccctatcctgacccttcattgctgaggcctgaggatctctgtcttttgttccctcacctgtctgcctgtctcctctcctttcctgcctggggggactgtccagaagacatcatcgtccagttcctctgcatttgaacagctgttcccccacccctcaataccgtttagagcagaagccagcaaatactatctgtcagggacagatagaaactattttcggcttcatgggccacacagtctcattgcagctcctcaaatctgctgttgtagcaagaaagaagccatataccctgtgtaaacaaatgaatatggctgtgtgccaataaaactattcacaaacataaagagtgggctggatatgactcagatactgtagtttgacaacccctgatctagagtaaaaatcccaaactctatagcctgcagcagtgcacattctgactttttttgtttttttttttttttgttgttgttgtttttgagacagagtcttgctctgtcgcccaggctggagtgcagtggtgcgatctctgctcactgcaacttccaccttccgggttcaagccattctcctgcctcagcctccggagtagctgggactacaggcgcctgccaccacgcccagctaatttttttgtatttttagtagagacggggtttcactgtgttagccaggatggtctcagtctcctgaccttgtgatctgcccaccttggcttcccgaagtgctgggattacaggcgtgagccactgtgaccggccacattctgaccttttaagcacctacctctccactagggcaagaacaagggtgaagtgagtgaggctgttgcctcaagtgcattttttcgtttgtttgtttttgttttttgagatggagtctcgctctgtcacccaggatgtagtgcagtggcacaatcttggcttactgcaacctctgcctcctaggttcaagcgattctcctgcctcagcctcctgagtagctgggattaaaggtgcacaccaccacacctggctaattttgtatttttagtagagacagggtttcaccatgttggccaggctggtctcaaactcctgacctcaggtgatccgcctacctcagcctcctgaagagctgggattacagatgtgagccaccgcgccccatcctcactgtctgctctgactcacttctctctcccatgtctcaggggcccctgactgaaccttgggcagaagacagtcccccagaccagcctcccccagcttctgcccgctcctcagtgggggaaggagagctccagtatgcatccctcagcttccagatggtgaagccttgggactcgcggggacaggaggccactgacaccgagtactcggagatcaagatccacagatgagaaactgcagagactcaccctgattgagggatcacagcccctccaggcaagggagaagtcagaggctgattcttgtagaattaacagccctcaacgtgatgagctatgataacactatgaattatgtgcagagtgaaaagcacacaggctttagagtcaaagtatctcaaacctgaatccacactgtgccctcccttttatttttttaactaaaagacagacaaattcctacctctctgtaccttggtttcctgctctgtaaaacaggaatgagaagccctacttgcaaggttgtggtcaccattccaggagtcacatcccgttagagctcctggcacaggtgtatgccgagcactgatggatcgctgtgctttgaacacaaaggtcctgctgggaacctctcctgattctggtggcaactagtacttatatgtctgtgtcacttgcctgcaaaatagcgattctgcaactttccaggaaataacctcagcctgcaaatcaggtctaggtagcatctggatcctgcccacctcttcagcctcatctgcccaccctgtgactgctaggccgccttactctctgcagtctacgtattgtgcacagtccagtgggaatctttaggacacactgagctctctccgcactgctcacagcccatccatggctcctggatcctgaacctcccatcacatcctcttcgtgacatcactctcccacttcagtccactcctccatcttcaccacttaacccactggtccctctggtcttttccaaatcatttgcaacatgccctgttggttcatacctcagtccttgcacactggggaccctcctcctagaacgccctcctcctgggccttcttctgtctctgtctttgaaaatggagttcaaggattggacttctgggttgagctgagggagagagtgaagcagcagctcatgatctccctcctctaaagccaaacccagggaatgagaaacgtttccaaaggggcacaggatcatctggcaaattaaacaacatgatccaaaaaaatttacctacatgcagcacccgaacgaggaaagggacatctcacaacaatcactttatgcagtagccctgataggaagaaatcaaaggactggaggaagcactaaaacttccctaaatctagactcttgcccatttacggcagcatcaaaaaaccgtaaagtaccaaggaacaattttttaaaaatcatggccgggcacagtgtctcacgcctgtaattccagcactttgggaggccgaggtgggcagatcacgaggtcaggagatcgagaccatcctggctaacatggtgaaaccctgtctctactaaaaatacaaaaattagccgggcgtggtggcgggtgcctgtagtcccagctactcgggaggctgaggcaggagaatggcgtgaacccgggtggtggagcttgcagtgagctgagatcgtgccactgcactccagcctgggagacagagcgagactccgtctcaaaaaaaataaataaataaataaataaataagtaaaaaatcatatccgagctgggcgtggtggctcacgcctgtcatcccaacactttgggaggctgaggagggcaaatcacttcaggtcaggggttcaagaccagcctggccaacatggtgaaaccccatgtctactaaaaatacaaaaattagccaggcgaggtggcgtatgcctgtagtccttgctacttgggaggctgaggcaggagaattgcttgaacccgggaggcggaggttgcagtgagctgagattgtgccattgcactctagcctgggcgacagagcaagagtctgtgtcaaaaaaaaaaaaaaaaaatcctatgctatggtttggatatggtttgtttggccctgccaagcctcctgttgatatttgatgcccagtgttggcggtggggccaaatgggaggtgttcaggtcccgggattggatccctcatgaatggcttggtgctgtcttcaaggtaatgagagagttctcactctgttacttcctgtgagagtttctccaagagctgggtgttaaaaagacattggcacctcccctccccagcccgtgcttcctctcttgccgtattgtctgcacatgcagacttccttttgccttccaccatgagtggaagcttcctgagaccctcaccagaagcaaaggctggtgccaagcattttctatgtggtgcagaactgtgagccaaataaactgtggggggtgcacggcaacatattcaagcttatgtacaaggcatttgaggtcgaggcatggaaaaatactgaggcaccgtgtgcgtgttgtttgtgcatgagattgaaactccttgaccctgaaaacagggcaaggaacggaatgtgtgataaggagcgcggaaagcagcctcctgagactgtagtctgagtgtttttaccaggccatatgtgtctcatgacccgaccgcaaaaggccatctggtggacattttggtttaacaaaccctttcgagaaacacttggcggacggattctggggcggcactctttcagagatgctgctgccgccgcatcccgctcagctggaattgtctgagtgcttcattcttggcgttcactgcagctacaagctgtataaacctcttttctttataaattacccagcctcagatattactctatagcaacacaaatgaactaagataacacggaatgcttctgtactgatgaatatagaacatttttgagagacttaaggaaggcccaaatgaaggaagaaatatatcacgttcatggattagaaggcaaaaatggttaaaatgtcagttgtctgcatattgatttaggtaatccctgtcaaaattcctatatatatataaaatatatgtatatgtgtatatgtatgtacataagtatagatgagtgtatatgtatgtatattgtaaatataagtttatatatatacatatatagttataaattgataagttggttctgaaatttatataaacacataaaaacctagaataaccaaatcattgtgataagaaacacatttagagaaggcagactttaacactagagtaatacagagagtgtggtgtggactagagtacagtctacaaatggacccacacatatacagtcaactgaatagcatcaagtctattcaattgggacaggaaagacttttaataaatgttggtaggtggtcgggcgcggtggctcacacctgtaatcccagcactttgggaggctgaggtgggtggatcacttgaggtcaggagttcaagaccagcctggataacatggtgaaacaccatctctaccaaaaatacaaaaaaaaaaaaaaaaaattagctgggtgtggtggcaggcaactgtaatcccaggtactagggaggctgaagcagaattgcttgaacccaggaggcagaggttgcagtgagccaagattgtgccactgtactccagcctggcgacagagtgagaccccatcttgaaaataaataaataaataaaaaataaatgttagcggaacaagtgaaattagggttggtaaaaacgagtgttgagctgtttctcacatcacacgcaaaaaattagcctgaagcgaatcataaacctaaaagtaaaagcggagactataatgtttgtacaactgtgctgtttgatatggtaaccactagccacatgtggctactgagcacttgaaatgtcctacatttagtgagaaaataatataaaaatctaagtaattaatatttaaaattgattacatgtttccatgtaacggcataatactcatcaatatataataacaatatataatacatgcaatagcttgaataaattttgaaaacatcttgagtcaaagaagccagatgcaaaagaatacatgctctgtagtttcacttatatgaagttcaagaacaggccaaactaatctacaaagacagaaattcataacagtgactgcctcaggttgggagtgggatttggggattaacgtgaatggcacacaggggaactttctggggtcctgggaattttatttctttcttttctttttttttttttttttttttttttttgagaaggagtctagctctgttgccgggctggagtgcagtggctcactgcaacctccgcctccagggttcaagcgattctcctgcctcagcctcctgagtagctgggattacaggcacgggccaccatgcccagctaatttttgtatttttaatagagatgaccaccatgttggccaagaccaccatgttggccaggatggtcttgatctcttgaccctgtgatccaaccacctctgcatcccaaagtgctgggattacaggcgtgagccactgcgcccagccagtcctaggaatagtctatgtcttaactgggatagtaattatgtggttatgaatcaaaacacattgaatcacgcaaataaaatctatgtattttactgtatgtaaatttacctttcatgaaagagaaattaaaaactcttaaatgatgaaagcttttggttccctcttttttattagactagctagtgatctatcaatcttatttgttctttcaaagaaccaactttggggtatactgatcttttgtaggaattttcgtatctcaattttattcatttcagctctgattttggttatttgttttattctgctagctttggggttgacttgctcttgtttttctaattcctctaggtgtaatgttaagttgctaatttgggatctttctaactttttgatatgggtattctggtacattgcatctttactttcctggatgctaggaccaaactggactagagtaaattacgtggttccttctgtcccaaagaaagatgtatttttaactcaggagctacatcagccccatctggctacattaagcatcccagtctcctctgcgtctcatgctggactctatgcaaaagggacagccagcgaaagcattattgatatgtcaatattgagatgtgagaatttgatcctgtcattatgttgttagctggttgttatgtagacgtgattgtatagttgcttcataatgtcagtgggttatacacttaaccacttaacaccactttctgtggtgtcatgtaacattctttcacttctgtgtttggcactcacttaaggacctcttataagtcaggtccggtggtaatgaatttttttcagtttttgtttgtctgaaagggattttatttatccttcgtttatgaagcttagtttggcagggtatgaaaatcttggctgaaatttgttttctttaagaatgctgaatataggccccgaatgtctttggcttatatgatttctgctaaaagctcttctgttagcctgatggggttccctttgtacatgacctgcctcttccttttagctgcattgaatattttttctttcatgtgaaccttagaaaatctaatgactctgtgtctgggggatggtaatcttgtacagtatcttcctggggttctctgaatttcctgaatttatatgtcaacctctctagcaaggttggggaaatttttgtggatgatatcctcaaatatgttttataagttgctgcgtctctctttttccaggattccagtgggccgtaggtttggtctctttatataatcccatatttgttggagggttttgtcattttttttaattctttttttaaaaatttttgtctgattgggttgattcagagaactggtctttgagctctgagattcttttctcagcttaatctattctgatgttaatacttccgcttgtattatgaaatttttgcagtttttcagctctaacagatcagtttgattctctcttaaaatgattattttatctttcagatcttgaatcattttattggatttcctacattccttggactgggtttcgagtttctcctgaatctccgtgatctttgttgccatccagattctgaattctatgtctatcatttcagtcatttcagactcattaagaacattgctggggagatagtgtggtcacttgaaggtaaaatactctggcttttggatgtgtcagatttctttcactggttcttcctcatctgtgtgggctgatgttcctttaatctttgaagttgctgttctttggatagggctctttgcttttatattctctgatgcccttgagggtttcacagtggtataacttgggcttagacaactgcatttgtttctggatgatttcaaggggcccaggctcaactcagcactcctgagctgcatgctctaactacagggacctgggacctggcccatggcttttttttttttttttcctggcccttcaaggttaagcacctcctatgctggaatggccaaggtgttccgggtccactggcaacaacgctccaataggggttgctgacaaagcattttggcagggtggccatgggtgatgggagttcctgcacgtggtgtgcatcagctgcagggtggccgtgggtcttgcaaatctgcttgctaatgttatgcctaagatcacgttataaaagactaacttgtgcctcattctctctctcgctgtctcttgctttctcactttgatgaagctggaggccatgttgtgagctacctatggaaaagcccatggtttcataacaaagctgattgagtagcaaatgttattttccaggcaaaaaaattaagtggtaagttcttctgaatatgcaaggcagaaataattccagtgtttcataaactctttcaagtatgaaagacatatcagccggggtgactctggggagttttttgctttctctgttcctcactgagatctacatggaagggaagggaaaaacactcgtctctaaaaacctcccacctctggcacccataagtctgaagttgcacttatgtgaggaactaccactttgcccctacccactggcttcctgttggggttactcttgtttttccaagccagttcttcccacgccgagggaacttatgatgagacagccccaggaaagtgcctgacacgtattccctgggctgccccttcccttccacatgcttcctgagtgagcacgtccaccttgtggctcagctgtgagccctgccctgatgtctcccccactttctgccccttgagcctcttcttggacatggtgcctccatcccccacccccgactcttcagttatcccagtcaggacccaggacttattccagttgcctcctgttttcaaccaccccatgcatgagtcaggggttcctgtaaacttcacttccccaaaaatgtctgccatcatgcccttcctcctccctccattccctgtctcctcccctctatctgcatggccaggcccttttcggtcttgacgattgctccatttcccacccaacatcccggtctgcagcctctcgcctccatgctgtggccctcgcagcacaagccctgaaaaattttcctgcatccagagctgacactgcctcttccctgctcagggccctctctggttccctggaaccctcagtccaagctgttcagctgatcatgtcccagcacctccaatttccccctggaagaccccacacatatttgcagggcccttcatctgcccggctgtctcatggcctgtgctttttcccctccacctgaggtgcccttagccacctgttaatatgaccaactcccccactagtctcagctcagcctctttccctgcggggtctttcagctttttgaactcctggatttgcattcgtgagtatgtgtcacacagtcaggtgtctcctctttctgtttttgtggggttgtgggagagacagcctctcagctccaccctccccgctctcactgttttcctcactcaaccctgaagaccctgagcaatggcacctcgcttcctgtcctggagggtcagtccctgggcctggtctgtgtgactgacagcaactcccccgcctcactgagctggtctcaggagggaagaacactgaatctctcccagctctcagcaactgggatcctggagctgccccagaaagggactggaggtgaaggcgacctcacctgtgaggctcagcacccactgggctcccagcacatttccctgagcctctctgtgcagagggagctgctggacgggtgctggggcaggcagcctggtcaggtgttgggctgtgagaggggcctagacctaggaacaaaacctcaccctcttctccccactcccaggaagtccctctgggtgcagatgtgcgagtgaagatcaggagggctcccagcccctggttctcacctaatcaaggggcgctcatgggcactggtttttccttcacccgtggcctcacctggggctactactccaggtgagcagggctgctcttttctagggaagccgagggattggcccccgagttccagatggggctgagctgtcctgtcccgcctgagttagaattgaagtggccgatgctaatctgaggccggtgttggctctacaggtgtggaggcccccaggggagcagggctgagaggcctgactgagcccctcctgctcaagacagaactcagatgaggacacccagccctgcgggacagatgcaggacatcactgtcagccatggctcagcccttctgaccactgagatgctgcaacttcccctcctgggagggagcgattgggcaaacacttaccctttgctggaaatctcaaggcacagcacgggtgctcacaatctgaatacagaacgaatgaatgaatgaatgaatgaatgaatgaaatgtctttccttatctcatgtgagagacttgacagttctttcactctccaagtaacatcagcttcccctgtcccagcccagtctgtcctgggcagacaagattaattaagtggctcctgggcagacattggtgcaggagacagggcccaggagacctgtgtgatttgggcaattcgctttctatctctgtccattcatgctgctacaacaaaataccataaactggccagtttataaacaacagaaattcatttctcacagttctggaggctgagaagtccaagaccaaggtgccagcaggtttggtgtctggagacagtttgcttcctcatagatggtgccttttccttatgttctcatgtggtggaagggctgtgcaaattcccctgggtctctcagatgaggggactaatcccattagactaatcccagagtcctcatagcctaatcgcctcccaaatcattataccttctaatactatcacatggggattcaaatttcaacaaatgaattttgaggtgacatattcagaccatagcacttgtcactgtggaccttgatgtcttcctctccgaactgtggaagtgggagtagagggcttgtcagctcccctgggtcatatgtggttcacaagttcctcctttctacagattctgtggcttccttaagtctctccttcccatttttttttctgattttaattgcaaactggggactgtgggaaagagatgggccatggtctagcccttctgaggcaggaggagcatagaccaatggggcaggagcatagcaaagagaattaaaagttggataaagggcagaataagtaaaagcagagagcagaagcaaggtgaggggacgggtgagcaagaagcaagaggcagaagttgagcagccaaaacaaaaagtaagatagagaagtgagcaaggacacccgtggccagcaggatctggaccaaaccagtaaggggcagttcttcagagctatgcatgtgcattagagagaaaaagtatccttaacatgaccctgtatgataatcagctcattaaagttcatgcatatggactgcatattatccatgtacttaaaattatgggatgggtcaaagtaactaagcaacatacttaaccatcaaaaaggcaggcactggccaggcgcggtggctcacgcctgtaatcccagcactttgggaggccaaggtgggcggatcacttgaggtcaggaattcaggaccagcctggccaacctggtgaaaccccatctctactaaaaatacaaaaattagccaggcatggtggcgggcgcctgtagtcccagctaccagggaggcagaggcagaagaatcgcttcaacccaaaaggttgaggttgcagtgagccaagattgtgccactgcactcaagcttgggtgacttcgtccccacctcaccaccaccccttccccccgaaaaaaggcagacactggatagagatttggcagccttgggaagcgaagaaaaacaaaaaaacaaacaaacaaacataaaaagacccaaagtaatgctgatctcacctcatagagatcagttcgctctccctctccaagagtgtgatactgtgcttaataaactgctgcttcttgctttgctgtctgtgtgtgtctcatccaattctttgtttaagacaccaagagcctggaactgcatggcaccatccggtaacacttctgcccactgagatactgcaaatatccttatggggagagagtggctgggcaaggaggaggcgcccaggaggcagattggtctgcaggatgagatactagctgcaaatgcagggattggaggtgagggcggggagtggcttcggacgcccaaacccagcatcttcctctctcaatcgttacagccaaatgatctctaggttatggacaattaggggacagtgtgggctgagcagatcaatgcagttgtatggaagaaaacagactgggattttctatgtatacaacatcttcaggaaaacctacgtgaagttagaattttcaaggcagcatgtgccgatgataaaactacatagaacagcaggaagactattatcattaaagtgaggctaggggctccttcaggagggagcgggggcatggccaataggaaaggggaatgtaagggtgaatgaattaataaaatctctttcttcatttcaagggacagacttgacagttcttttgtgttctagttcttcaagggtgcttattttgtgtgaatcactgagttggtttttaggggacacttttatgtacatgtcttgtgtttctccccgctcaaaaaaaactgtttcaagaaaagctggcctggatctaagggggctgcagcttgcaggatttttcccacttcctcccagcccagtcacacagtttaaaataatcttctgttgaagtcaggtgcgtgtttcttctctcagaaaatcgcgcccatcactgagggtggacgccccggggctggtgtctttgctccacgtctcctgttcacctgaacccctaggagcagttcctgcaggagcaaagccccagggccagcagacccctcacactctgcactaaccaggcctcatgagatagcagtggtgaagggaaatgtccttgtgctcagagagctgtgaggatgggaatagtgtctgctcttttcatattgatcctttcccttatgactttcctgtctaccaagccccacaatacaacaatcacagcctcagcttccccggcctcctgcaggctgggctcccctccgtgtccttggcgtgtatcaacaggcgcaatcctcaccttcacagccccatgtccgtctgctcggtcctcctgagactgaacccccgacctaggggagagtgaccccaccctgcctgtgccccccactgaagctcctgtcatggggagctcaaacgtcaggagactcagtgtctccccaccacacagtgactccttggggacagtgtccggctctgctgtgttgacctcattgtgcagaaagggggtgcccacctcgtggctgctgagggagggatgagaggctgcctgttcaccccacctgcacccctgtctctcatggccccgagtcccacttctgagctacgcagacatccacagcctgtgactcaggggtctgggcagatgggagttattttcaccctgcagaaaatatcacctaaagggaaaggcattgagagggaggcaggaggtggggtgggccctgcatggggtgggaatctgggtgagtctgtctcccgctctggcctcagggacccaggagtgaatgtcgggtggtggacggtggatctcccagggctgacccagccctgacagtgtctgtgtgtgaagttcttcttctaaggaggtcactgttttgacctcaccaccgacttcctgtagggcctcttctaagtcttgagcccgcagttcctgagagaagaaccctgaggaacagacgttccctcgcggccctggcacctccaaccccagatatgctgctgctgctgctgctgcccctgctctgggggagggagagggtggaaggacagaagagtaaccggaaggattactcgctgacgatgcagagttccgtgaccgtgcaagagggcatgtgtgtccatgtgcgctgctccttctcctacccagtggacagccagactgactctgacccagttcatggctactggttccgggcagggaatgatataagctggaaggctccagtggccacaaacaacccagcttgggcagtgcaggaggaaactcgggaccgattccacctccttggggacccacagaccaaaaattgcaccctgagcatcagagatgccagaatgagtgatgcggggagatacttctttcgtatggagaaaggaaatataaaatggaattataaatatgaccagctctctgtgaacgtgacaggtaaggcacgggctccaagagaggccaaaggcaaatgtgatgagggctttagggcacggctgagacgggacacatgtcctgggagggggccgggggtgatggactcaggagaggagctggaccagagcctgagcttccccaggaccgcaccttggatgcccctcctgatcctgcaggcccctcccctcaccagccctgacccacaggcctgacatcctcatcctgcctctgacgctggcattgtggcatgtggggccttatgactccttgttttggggcctgtcctaggcatggccggggtttagcaccatcccaggcctctccccaccagatgccagaagcacccactccacccatgcagtgagacaataacaattatctccacacattgttaaacgtcctggggggttaagtcctccccagttgagagccttaggtctacacaaccccgtgactctctcaggccaggccagggaggaagcacttcctggcgcaaaccaagggcagcagaggcacctgagcctggacagggagactcagcacacggcccctccatctctcatgccctgaggtcctcggagatccacatttagatgctcaaaagacaggagggacctccacgatggtccagaggccgggagggcaggacctacgtgtctggtgcaggccctggtgctccagggaagcccggaggtaggaggtgggacacggtctcttctcctccctgggtgggtctctagggtctctgagcttcagggtttccttcactctgtgcagagggaaccagttcctatagcatgtgggtttgtagtttctctttcgtgctgggttgaggtctccagctcctctccagcccctctccagccccctgtgggtcccacagccctgcccctcctctccctcccacttctctgctcacacaaggagcccaggaaccctctgtctcagagatgctgctgcctctcttgtgggcaaatgaagagagggacagtcggggctgggctgagcctcatttccccacagcgtcccaggccccactgtcaagatacaggctggaggtgctggagttggtgatggtgcaggagggctagtgcgtctctgtgccctgcagtgtcctttaaccctattacaactgaactgactctagccctgtccatggatgctggtttaagaaagggatcaatatacaatggaataatccagtggccacaaacatcccaaatggaaaagtgcaggagacacggggccgattccacctccttggggacctgaagaccaacaactgctccctgagcatcagagatgccaggaagggggatttgaggaactactacttccaggtggagagaggacagataagatggaattacaaaacgaagcagctctctgtgaatgtgacagataaggcacaggctccaggagacaccacagggaaaggtcatgggggtggcagcgaaagcctgggatggggcccctgccctgggagagggctgagggtgaagcgagttgggctcagggcagaagctgaaccagagcctgagcttcccccagggctgtaccatggatcctctgtcctgatcctgagtccccctctcttcaccagccttgacccacaggcccaacatccttatccccggtaccctggagtctggctgcttccagaatctgacctgctctgtgccctgggcctgtgagcaggggacgccccctatgatctcctggatggggacctctgtgtcccccctgcacccctccaccacccgctcctcagtgctcaccctcatcccacagccccagcaccacggcaccagcctcacctgtcaggtgaccttgcctggggccggcgtgaccacgaacaggaccatccaactcaatgtgtcctgtgagtgctgagccaggacgccctggtccctgatgagggggggacgtccctgagggcagaggatggggtcagggctcgacactgggtgctgggtcccagaatctgggctggttgtgggatcaggaggacgctggctccgccttccccatttatgcagctcctggggagacagggccagtgtccccagccctcacagtgatgcaggtctccatgtctttctgtcccagaccctcctcagaacttgactgtgactgtcttccaaggagaaggcacaggtaggatggagccccctccctggggctgggggagcagggccttcagctcagggcagggccaggtccctcctcatcctggactcaccctggtgatatgagactcccttgtagttgaacccaggcctcctccccatccttagcctctgtggccacctgagcacctgtcctcttccccccactcccctcagactcttgcacacacaccctcctcagccctgcagccaggacagggggaaatacatatagcaggagcagcctttgggcctcttatcttccatctcctgaatatgccacctaactcgtctttttattttacccaatagttttgagctacgttcttttggatacatgctataatcacgtgggcaaaaattttaaattcacagtaaaatgtgtccccagaatcaaccagggtctgtccaggctgtcctgagccttggtttgtgcacctggaagatctcagaggtggtttgatgtcagcagtgagactgtttgcaccctcttctagggatgtgtgtgattccactgtctgaatagtctctgattttgtggcatctcctaatggaagatcatggcactaattttatcctacggcacgaacactgcaatgaataatgttgtatctactcccacaaggaatatctaagtgtataggataaattcctaaaagcacattttaccagtgtcatatgttctttctgattttgaaagatatggtgaagttgtcctcaaataaaggtgggcaagtttacattcccaacagtgagcggtgaacataagtatgtccctgcaccagcctacatcactctctgttccattccccagtctcattctgtatccttcctccctgtttcaatcactttgtctctttgaacctccaactttttctctacagcatccacagctctggggaacagctcatctctttcagtcctagagggccagtctctgcgcttggtctgtgctgttgacagcaatccccctgccaggctgagctggacctggaggagtctgaccctgtacccctcacagccctcaaaccctctggtactggagctgcaagtgcacctgggggatgaaggggaattcacctgtcgagctcagaactctctgggttcccagcacgtttccctgaacctctccctgcaacaggagtacacaggtgggtaagggaggggctggaggaggagaacacacctgccccaccctcatgggccacccactgcccctgagcttcaagggggagctcagctctggtctgtgctcagctgtgaggcctggaacttccctgcaacccagggcactgctgtcctcttcctgccaggaaaggtgtgtaaggcaggaagaggggaggagtgggtcttggaggggaggagctggggcctggacaggtgtgtttggggagacacgtgccttgctttccagtgcctggactagggtgacacaagcaaggcactcacttctgggcacacgactaaaaaacaaaaaataaaacaactcagcaagcaagtgaaataatattggatgtgattatctttattaaaaactaaaaattattgcaaaataatttgacagtgaatacaaatcaaaatttcaaatacaggcaggctgtgcttaccactctcatgcctcagtgacctcaggagttgtcccttcctcctccctcccattcttgccctttgtttctgggaagggggattagggtacccaagttgggggccttataggaagtgggaggagaagagacccagttcttggagttggatcaccaaaacaattccaatccatcctcaggcaaaatgaggcctgtatcaggagtgttgctgggggcggtcgggggagctggagccacagccctggtcttcctctccttctgtgtcatcttcattgtgtgagcactgaccctagggagggagggagagtcctgggggagggcggactgggagcaggatccctgaagccagagctggaagggactgcatgggtcaagagcttggggcaagaatgagctcacgggtgcgtggcaagaatttcaagagcgcccttgtctgtggggctccacatctgtggtgaaccttgggccccaccacccaggaggcaggagcctctgttttcaacactggggtctctgggactggaccaccctcctcccacctcagttacccctccagcgccccaacaggaaatacagggcaggggttggtctgcccactgcaccccgatctgaccacactgaaaggctctctggtctcttcactcagagtgaggtcctgcaggaagaaatcggcaaggccagcagcggacgtgggagacataggcatgaaggatgcaaacaccatcaggggctcagcctctcaggtgagtgatatgggcgtctccacacccagcatccagctgggacatctcccacaggatggcctccaggatttctctgcttatcatggccaaaattatctcctcatctcctcctccttcccaccatccagcttctcctgcaggattccccatcttgctgactgcatgacagtccctcctacctactttctctcgggccaggcatggaggaggagttatctcctctctgtcctccctttcttctctatagctccacattcaccaaatcttgtccatttttcctccctaagaatggctagcattgctcccacccccaccaatcctaaactctctcaatgctgaggcctgaggatctctgtcttggacttcctcacctccctgcctcttgtgtcccctgccctgatgggaggaatcattcagaagccatcactgatcagtttctttgcatctggacagctgttcccacccccaacactgtctagagcagaagccagaaaatactatctggaaaggccagataggaaatatttttggctttctggcctacacagtctcattgcagctcctcaactctactgatgtagcaggaaatcagccgtagaccatgtgtaaatgattagctggctgtgtgccagtaaaactttatttataaaaacaagctgtgggtagaatttgtcccaagggctctagtttgacaagccctaacctagagaaaaagcccaaacttcataactgcagccctgcacattctcgtctcttaaacatctacctctctagcagggctggaattagtgtgagatgagtgaggtcctggcctagcatgcaaaatttaagaaggtgccaaaaatctcagtaattgtgatagttttaaaaaaaactcttattttaggtttgggggtacatgtgcaggtttgttacatacataaactctggtcagaggggtttgtggtacagattattttgtcacccaggtcctaagcctagtaccccacagttatttttttctgttcctctctctcctcccaccctccaccttcaagtgggccccagtgtctgttgttctcttctttgtgttcatgagttctcatcatttagctctcactgataagtgagaacatgcagtatttggttttctgttcctgtgttcgtttgctaaggataatggcctccagctccatccatgttcccacaaaagacataatctcattcttttttatggctgcacagtattccatggtgtatttgtaccatattttctttatccattctgtcatggatgggcatttaggttaatttcatatatttgctattgtgaatagtactacaatgaacatttgcttgtatgtgtctttatggtagaatgatttttattactctgagtataaaaccagtaatgtgattgctatgtcaaatgatagttctgcttttagctcttcaggaaattaccatactgctttccacagtggttgaactaatttacactcctgccgacagtataagtgttcccttttctctgcagccttgccagcctctgtgattttttttactttttaaaagtagccattctgactggtgtgagatgatatttcattgtggttctgatttgcgtttctctagtgatcagcgataatgagctttttctcatatgtctgttggccaaaaatgtctgttcatgtcctttgctcactttttaatggggttgtttttctcttgtaaatttgtttaagttccttatagatgctggatattagacctttgcctaatgcatagtttgcaagtattttctcccattccggttgtttactctgttgatggtttattttgctgtgcaggagctcttaagtttaattagatcccatttgtcaatttttgcttttgttgtgattgctttggcatctttgtcaggaaatctttgcctgtttatccagaacgatattgcctacattgtcttccagagtttttatagttttgagttttacatttaagtttttaacccatctcgagttgatttttatatgtggtataaggaagcagtcccactcaatcttctgcatgtggctagacagttatcccagcaccatttattgaatcaggagtcctttccccattgcttttttttgtcagctttgttgaagatcaaattgttgtaggtgtgtggctttatttctgggctctctattccgttccattggtctatgtgtctgtttttgtaccactaccatgctgttttggttactgtagacttgtaatatagtttaaatttgggtaacgtgatgcctccaggttttctttttgcttaggattgccttggctatttgggcacttttttggtttcatatgaattttaaaattgttttttctagttctgtgaagaatctcattggtagtttgatagaaatagcattgaatgtataaatttctttgggcagtatggccattttaatgattttgattctttttatccatgagcatagtatgtttttccatttgtgtcacctttgatttatttgagcagtgttttgtaattctcattgtagagttctttcacctccctggttagctgtatttctaaaaattttattctttttgtggcaattgtgaatgggattgtgttcctaatgtgactcttggcttggtagttcctgatgtatagaaatactagtgatttttctatattgattttgtatcctgaaactttgctgaagttatttatcatttaagaagcttttgggctgggactacgaggttttctagatatagaatcatgcatctgcaaagagggatagtttaaattcctctcttcctatttggatgctctttatttctttctcttgcctgattgctctggccagaatttccaatactacgttaaacaggagtggtgagagagggcatccttgtcttgtgctggctttcaaggggaatgctttcagcttttccatattcaatatgatgttggctctgcgttcaccatagatagctcttattattttgagatatgttcctttaatacctagtttactgagagtttttaacacgaagcgatgctgaattttatcaaaagccttttctgcatctattgagataatcatgtgtttttgtctttagttctgtttgtgtggtgaatcacatttattgatttgtgtatgttgaaccaacatgaagccgacttgatcatattggattaaccttctgatgtgctgatggattcagtttgcaagtattttgttgaggatttttgcatcaatgttcatcaaggatattggcccgaagttttcttcttttgttgtgtcttcgccagattttggtatcaggatgatactggcctcatagaatgagttagggaagagtcagtcttcctccgtatttgggaatagtttcagtaggaacagaaggaggctcagatctgacatttattgtgtgattgaagagccttccaggcagagggaggagcaaagcaaggcccaggcacaggaagaggaaaggagaggagccatgggacatctgtgtgattagacagagggaggcaggactgagagcaggaaatgactttggaggagttgagcctatgtgaattgtgtctgactgcacaggctactgtgagcatttggagagttttgagcagaaggacatgatcagacgagattgggtccgttcagggtggtatagctgtagaccagaagaacatgatcaactttcattttcatgggattcctctggccactgtgtgcagaagagaccgtgtgtgtggcaggggaaggagagagcataggaggtagacaggaggctggtgaacatcccaggcagaaggtggtgttggctggaaccaagatagcagcagtggtagacatgactgtctcccagatgaattctgcagtggaacctactgggatttgttaatgaattggaattagaatgtgagccacagaaagggagcaagaattacttccagatttttgccctgagcagtgggaagaatggaggtgccaatcattgaggctgagaagattgcagaagaaatggatttgggaaagaaaaggaggagttcagattgaataggttgagttttgtgtgtctttggacaagaacgcgggggtttgaattataccactggatcaaagactatagtcaggagaaaggagtgggctgggggtacagatttgggagtcattagcctattgatggcatgaagccaacacagtggataagatcacaaggcaaaggtaaagaagaaaagaacccggggctgctctgatatttaaggtcagggagacctgaagcaattggcaaagaggttgccaagaaggtgaggtggacccagaaaagcatgatgtcctatagttgagtcaagaaggccttctgtgtagggaaggtgagcagctgggtcctctgctgctgaaaagtccaggaaggagaagactgcaaggtggacatttagactcagccacttaagtggtagtcacagtgaccttgatagtagcagtgcttagacttggtatgtgtgtgaatattaatttgagtaatcaagagagaatctggcaagcaaaatcactgacagttccatggagcatcttctgcacaggggagcagcagggaagggctgcgatgaaggaggaccctcccaggcagcctctgtcactctctgctgtgtgagtctgtattagtttcctgtggctgctgtgacaaattaccatgcatttcctggcttccaacaacacacatggattaaagttctgaaggtcacaaccccaaaatgggtgtcactgggccaaaatcaaggcattggcaggcagggctggttccttctggaggctccaggggaggatgcaatttctcaccctttctggcttctagaggcacctgcattccttggctcaagtcccttcctctgtttgcaaggcaagtagcctggcatcttccaatctctctaagccctcctcctttcacttgtaaggactcctgtcattccactgggcccacccaaataatccaggataacctccccatgtcaatatccttaacctagctccatctgtaaagtccctttagcaatgtaacgtaacagattcacaggtttcaggggattagggtatggacattttggggagcagttatacttcttatcagaggatataatttctttgactgagttgtcctccccataccaccgaactgtgagcttcctaagagcaggtgccccatccaaatcaaggccctgtaattctctctcacttagcctcttcctgcccatcttataattcacacatagatattcgtttgtttgacagtcatttttgccaaattccctcaattaaaaagtgagtttcaggaggtcagggccaacacctactgtgtccaccacagtccatccagcacccggatcagggcttcacacacagagggccccagcaggactccaggctttggggtcagaaggaagggactggattgggtcccggcataacagggagtttgggtacgctactttcttcatggagttgttgcgggaagttaataagattaataaacaccaaacaagttgctcaataagtgttaaatattgcaggaaagtataaatgaaggagatttctataaaatgaacgtgggatagaggcaggaactcatgaagtttaattctatacagaggaatatatccgaaccaaccaaccgatcaaacaacttgtgactctccctgccttatcctatttccactgctctgctctgactctcttctctctctccattcagggtaacctgactgagtcctgggcagatgataacccccgacaccatggcctggctgcccactcctcaggggaggaaagagagatccagtatgcacccctcagctttcataagggggagcctcaggacctatcaggacaagaagccaccaacaatgagtactcagagatcaagatccccaagtaagaaaatgcagaggctcgggcttgtttgagggttcacgacccctccagcaaaggagtctgaggctgattccagtagaattagcagccctcaatgctgtgcaacaagacatcagaacttattcctcttgtctaactgaaaatgcatgcctgatgaccaaactctccctttccccatccaatcggtccacactccccgccctggcctctggtacccaccattctcctctgtacttctctaaggatgactactttagattccgaatatagtgagattgtaacgtgtttgtctctctgtgcctggcttatttcactcaacataacatcctctaagttcatctgtgttgtttccaatgacagagtaatgtactgaataattcaaaatagctaaaagagaggagtttaaatgttgtcaccaaaaaaaaaaaaaaaagataaaaatttgagctgatggatgtgctaatcatgctgacttgatcgttccatggtgcatcgaggtgcgggagcctcacgggggctgcgttcaggtcgctcaggtactcagggcaggactggaatttaatccctgcctgattctgaggtctcttctctcacccggcacccagcactgagtgaagcaaccactgactgggcaccccttagccataagtttgcagcatctccgttgactccatggcctctggtgaaggaatccgagaacctggacacacaggagctgagaaaggaggcgcctgaaattacagcccagctctgcgcatggcctgccccagcctgcatagctctgatcagcagatagagcttccaatggccatgctgcccatgatttcatccccagggccctggttgggtctgcagacctccgccaggagcccccatctccggaccttggtgtgactgggctgggtccctctcttgctggtcccctccagagggaccctggaccctttccagcctcacaggccctatggagaccccagcccttctccatcaccttctcctcacctgcttgcccctctggtcttgtcctcgggtctgaggacatgcagcctgatttgccctatggggagaaatcagggaagaagtcacatctcaggtccataagaaacacgggagagtcctgggtagagaggtgaaggggcccaacttcctgccaagtccaagcccaagccctccccatgtgggaccctaggaggtagaggagatggtctgcggtcttcacctctccactgagagtcctcaacatcctcatacttttaaagatttccaagggcacaggaggcagacgccattgtgtgggggaaagaggccgggtgaagctgaggaaggagttgacactgttggcgcaattaccaggggtaagtaacaacaatgatggagttaataataataatttatttcacactgttatgtcatgccataagacgtgccatcaactctggaaattaggttagttattattacccctgggggcagggagagcagcttgtttatcttttgttattagaggcccaagaatcaagccaagagcttggtgaaatttgtggggagtagagatttgtcatggtcatggagctatgacaaaatcccgtcccatccctgcatctttctaattcctcatcttggagggagctgaggggaacagttgaggccacaggctgtgggttcggcctgcccgggcttgaatcccacctcttctgtgggttagcactgaagccttaaataaaatactcaaactccatggggcttagttttctcacctgtaaagtggaggtgaggctaatcacattcactttctccatagagagacagtgagggtcaagcaggttagaatggtggtgggcacatggtaagtgcacagctaatgtccaccactcttatcccccttatccccctgtgactcaccctgactctgatctgaggactccagaggattcatagaggaggcatctttggacccagacctgagaggactgggagatttcacccagaggttgtgagcatgtcatggcagggtggaggtggcactcctgagggtgggcactgcctagcagggcatggaggcagggagatgtgcagagcatgagcctggacgggagctgctgcactcacggggggcctggatcctgacgtccatgtacatgatcagctgtgtcacggggttttccacagtgcattggtaagtgcccatctgctaccaggccagactcaagagatacaactttgcatatgagaagtttaggaaggagctgttgtggatccagcagtacttgagatctgggaaagaataggagacacactccatttccacctgggagccgatctcagccgtcacgatgccattgaaggcatcaggattgcccctcagcagcagatagtcaggcccatctgcagagacagggaaggaggcctgaggctgtgtttctgaccctttggggtcctgggtaccacctcatgaggtcctcctccagccaagaggttccccactgtgcaccctgagctgacccctagacctgccccaggcaaggcagctgtgccaacaacaataaccataataagagcacctgccatgatcagggacctactaggggccagccccatggtagccctttacctcgtaataaaatcattggagtaaaagcaaacacatggggcctactgtgtgccagacactgttctaagctctgtgcctgtccccacatttgttgaattcccagaacaactcatgtgattggttccactattgatccattttatagatggaaaacaatgaggctcggaggagaggattaggacttcatgactgcaactgacacagaaggattgagccagtctcagggcctgggggcaaccgccctgagcagctgaagcctctggatcctgggtcttggttccaagcctctgacctgtaaacagctgtatggagatcagaaatccttcacgcttcaaccccagcttccacacaatgggcgccatagcctgtgcattaggaaatctaacacaccactaaagtgtttccagaaggagatgtaaaggtgattttagaagtgtgattatttttttcaggtgaaagatgtggaagagtttgataaactctgtgaacacacctggaacactggaagaatctaagtgttgatgtatttataagctcagtagattagatttccaagagctgtccgagaatttgtgaggatcttgctgggttgtgaacttgccccagtaggcagctgaagggctataaagaaaaaagaatgtatggaatgtataactgactctttaaatcaaactctctgtttaagggagcacagtctgttcaatttcagtaaaagagagtgacagtgactatagtaagtttacaagaaaagaagaaagaaatcaatgagtggaatttgaagggtcaaggggtttgaacacttaataaactgaacatcaatttaaaaaataattggttttaagtagtcccctatttacacaaaagcagacctcagcaaaggcacactgaccatttctaatctgagaagtgaggactggggtccctatttcacatttgagtgcatcagttctgagtagtgagggcagctcccaagtccacagagctcaagagctggagctgattccaacccagaccaacctggctgcaggctggcccaggatgtctctggcctagtcccatttgcagatccgtggtgagtcccagaggtggacttgtgtggcaaagagctgaaccctgccaaaaagaggcctggcctttgctctcagctactgggagggaacctctaagtccctggaatgtctcacctgattagagtgtctttgtttacctgaaagccttggacttcaccaaatagtctaataatataactaacgataggactttgggtcactggtatcagctctatctgtggagcagctgaaactaaggtcagccatgtagacagttatccacatctatgtgacaaagccacaccaggacatcaaggctcaggtgagtgtccctggttggcaatgctctatgcatgttgtcacatgtcatgtcaggaggaattaccacagtctatgattctactgggaggggacaactggaaactccccattcggaattccctggaccctgccccatgctcttctcaccttggctgactttaatctgtatccttttgctgtaatgagacatcacatgaggataacagctttcagtgagttctgagtcctactagtgaactatcaaaactgaatgtggtcagggactccccaatgtgcagctggcatcagaagtgagggcagtcttgtgaattgctccctaactactcaggactgctggattaaaggctgtgcaggtcgtttgaggatagaaaggattcctggcaacactgcctggtttgaaccaagcactgccacttacttcccatgtgatctcagttaagttgcctccctcccctaagcctctttctacacctgtaaaatgaagatatgaaatgtttcctcttcatagggctgttgtgatgcttaacttcagaagcaagtggagaacgtaaaacgtggaatccttcttagctaggctcttgtgtctgaggtccttattactaaggaaaaagagggaatgaatactgagaagaaaccagcaaccacggccacagagagcatctcatcagctctatttggctgcaccaacatggagcactccttttagacacagcattgtgccaagtccctgcagaaacatgtccctccctccatctagactgtgcacggccagtgatgcctggtctgaacagtcaggatgaatatggcagaagtggcttcattcagacagagtccgtggcatgaccctgactgtctcatgcaatgagaccctcatgaggaccctgctctcaggaggggggtgtaggcttggagggcacctcgaccttcagggactcactttcattctctcaagcaaaccccagaactatacctggcccatctcatccaggatcccccatgactttgagaatcttgtctgaaaccctgtctctccagtcaggagtggtagcacccagtgctcacctaggggcaggaggcagcttcgggagcagccccccaaagcctttaatctctttctggagctcagctttgtaccttcttatcaagagagcaaaacgtcacagttcctcccagggcaaagttttgcctggcacagccagagtggacactaatgaacagtgactccttcctgtctttcaggcttgaagatcacaaggaatgttaacctgggatctttgaggagctatacacaaggtagatttctgacaggtccctacccgcgtccttgcagcgctgtgtgagcaaaccccatcacccccaaatgcatcacaccaccagggggagccatggagttgcacgatgcatcagcactaatctttgtctacaacctcctgggggaagggataagaagtggatagaaaaggtgagaggcaggagccccgaatcagcttccagagaagatggaagtgaaatggagaaataataataatgacattaacaatagcaataacattactaataacattaaataataactacttcctgtagttatcattcctgttcggtgagattgtaaatcttgacataggttagtctctgaatgggtgggagtcaggtgtcaggaagcatttgggggtcaaagagggtggagaagattggtgcagtgatccctgcaactctctgggtgagcagcagggggcgccctaaccatggcagagactgttgagttggttgcacagacataaccaagtgtcatggggcagtgggaagtccatggactctgtctcagaaggagaattacttgatctctgtgtgcctcagtgtccttatctgcaaagtggacatcagagctcctacctttatgagcctgagaacaaaaaccagggagaataaatgaacaaccacagcagcaacaacaaacaaaaacaagagccaaaaccaagtagcgagatgggcctttctatcatctgaccctgaaatccagtcacatttaaaaccaggtctacccctcagatttcccagacaacagaagtcaatgcattttttccctttgaaagtgaaaaacaaacaaacaaacaaaaaacatgctgtaatattggagggaaacaattatggggtttttttgtgttttttttttttttgagatggagtctttgtcgcccaggctggagtgcagtggtgtgatctcggctcactgcaagctctgcctcctgggttcacaccattctgcctcagcctcccgagtagctgggactacaggtgcccgccaccacacccagctaatttttttgtatttttagtagagacggggtttcaccatgttagccaggatggtctcaatctcctgacctcatgatctgcccgccttggcctcccaaagtgctgggattacaggcatgagccaccgtgcccaactacaactatgatttttatatgaacattaattccattatgtggttccttgaggttgcctgatgtacacattgtgggaaaggccatgagagctgctacacagccctttggagatggcgatcatgaagccagcaaatggtcaagggctgtgagtcttcaaaaatctgtcctgataagtgatgatgtcatctccacatgcaaacctgtctccagagaagacacaatcccatccactcaatgctgccgatcctcctaaacaattcaaatgggctttttgcccagcaagaaagggatttttgtatgtacattcatgttctctttcttattcatcagaagttatttttctacgcacctcacattctcaatgataactaagagaaattccttgtttgattaactcacactctataccggaacatttgtgcatctcacaacggttcccttagagcccacctttccttttgagtttaaaccttccttggagtaatcagaataacttccaaataggaaagaatgaaagagactatgtttattcattttgtacactcttaaaacataaattgtatttttgctagctgcagctaagacttttattttaaaatggggcactaactttccttcctcctacattaaaacatttcagaaaaaaacttaaaatcttaaaaataattttaaatactgggataaatttctttaaacataaatttccaatactttctaaaaaaggtcatatctatttcagaactctaatatcaccagaaccccagagaacatcccccaaatttttaggcataaaaattctcttgtttttcagcagacacttgatcagtttacctgcatccataaccttggatatggattcatatgtcagagtctataagctggaacattaaatacaaaattgaaatgatttattttcttctagctgttccaaaaataaagcatacaaaaactttaaagtcacaaatgtaaactattgtcagaacagaatgttaaacattttttcattattagacatcattattaaatacaaataagtgatgaataatatagaaaataatacttattgtttaagaggcatatatgtgtgatggaaataaaaagtctgcattcatttaagttaggttacatttatttgtggacacaaacaggcccacgtatgagaggagagaaaggcagaggaggggagcagaggggaggatggtgcagactgggtgggccctgctggccacacaggaacctggagcctttaggcagagcagagactagactggactttcactctaacagaacccctcggcttccctggacagaacaggcccaagtgggtcatggcagccacatagaaactggaaaggtgcttgctgggtcctccaggaagagggataggggcttgaaccagggaggcaggggtggcgtaaggatatgcttttggatgtgtgtggaaggtcgtgctcacagagttttctaatggatgtggtcagcgaggggaaggcaagaccaaggatgaagccagaatgttcccctgagcacctggagggaaggagcggtgtccatagaggacttcagaggggaggctttcaggggcgataattctgagaatctcccttacatccaaatgggaacagaacagagacagctgaatgcaaatgcctggagttcaggagaggggtccaagctgaagatgtttcaatgcacagctggagtagtgatgaccacagatgaggtaaggaaggggtgaagacaggcagagaggaggacacacatttgtcattggtgctttcatgacaacatatgttatcttcaatctttttgataatagtcaccctaacaggtatgaggtgatgtctcattgtggttttgatttgcatttccctgatgactggtgatgttgatcattttttctctgcctgttgaccatttctgtgtctttggggaactcgccattcaagtccatcatgccttttcaaatcagattatttgttttcttgctgttgaactcaacttgtttgagttccttatatattctgaatattaaccttttaccacatgtgtggtttgcaaatatctcctccctttccataagtagtctgttcactcttttgtgattgtttcttttgccatgcagaaacaaactaaaacaactttttagtttgatgaaattccatttatctattattgcctttgttgcctgtggtttggtggtgttaacttaaacatcacacaattaccaatttggaagaaagagctttatttcttataaaggattacagcctgcaaggtggccatccagacaggctgggaagcagagcctgcagaagaggctcagagacaagcactttaagggagggaggagaaagacaggaatttaagctgaatgggctggccaagtatacatattcaacaggttacagaaggagctttgaatattcatgaaagggttttgacccaagcatattgaacaaacacgcatgttacatgtaatccatgttcaccttagggtagagacttaccatgtaaacgtattacaattaggccctatatgtcaaaaggtctttggaggacacagcagccctcaagcgcgcagcctctgtaaaacctgccataaccagtccatgctccatgttcttatcaagagaaagttactgaaatcagtcttttgtccagtcacaagggtgtggggtcagtgtctgctggtgagctgtatattgttttaatattacttatattgagaccagtgcttgcttagctaccagagaaaaataaacatattgtggcagttagaacatagtttattctctaagtgtgggggtgtgtaatttaacccctgcctggcatggccttaggttttgtatatgatttggtatctcattgccacagagtctgttctgccagtcttatgatctccatttccatattaaggttaatcagttgctgcatctcaactgcaaaaggaaggggctataatgaggtgtgtctgacctctcgtcccattgtagcagcaactcagtttttaagatttttctggggtccccttggccaagagggggtctgttcagttgattacagggcttaggattttatttttagtttacagtatctaaaaaaatctgagcccagataatgtcaagaagctttttctcctgttttcttcaaggagttttacagtttcaggccttacatttccatctttaatccatattgagttgattttgtttacgtctgagataactggcaatggcagctttgatgaacatgtgtgaaagggtgggggacttgattggaagctcgtttggaaaataaccgaagaaaggaaggtaggaagagtgacgacaaacaacctcttgaggagttttgctgcaaatgttacccacccttggaggggtgagttggccctagtgggtcctttctctgccccctgccacttacgccaatagaatgagaccagaatcggcaaagcggagaagaaactttattcattgatcaagaaatggagaaagggagttcatgtgcaaagcaccttctcccaggggttggtaaaaggggatcttaagggcccttagggcaggtagttggagactgaggcgggcagatctggaaaaaggtgggttccttcaggaggggctgaagtgtgcacactcttgtgttttcttttgtacttggcaccttctgtgcctagcaaggcatagttctcgcccctgagtggagattttagtatggtaatgaagcaagaaatcaggtcaaggcctgcactgaggcaggaatccaggtccaggcagcacgtctgggctgaactcatcccctggctggttcctgttgctggctcccagcctttgtttctggcagcaagcagagctgcaagcacaggttagtttcacaggttttggggcttcctgagagaactgaggtcatgttgcagaaacacaaaaaggaacagagaaatggatctggagaagaagaatttttctcagttcttacccacaatctcccagaggtgctcaaattcatagacaaagaaagtagaaagttggttgccatgggttgggggcaggatgggataggaagttatcatttagttggtatagagtttcaatttggcaagatgaagaaatttctggagatcaatgattaataattgcataagagtgtgaatgtacttagtgccacttacctgtgcactgaaaaatggttaaaattgtaattttttaatgtatattttaacacaaattttaaaaagcactaaatatttgatcagcctcctcgccaaataagaaaaactgatggcaaataatcacatgaaagcattctcaacaccatttgctgctacgaaatcacagattagaaccagaatgaggtagcagtacatacctattagaatggctacaaaacaaaacccaaagaaatttttttttaaatccggataataccaaatgttaatgaaaacgtagagcaaccagaactcatatattctgctggtgggaatgtaaaatggtacacccactttggagaacagtttggcaatttcttataaattcgaacttacacatatgaccaagcacccgactcctaggtatttacccaagagaaataaaaaaactagtgtccacacacagaaatctgcatgtgaatatttatactagttttactttacagtcaccaaaacctaaaaacaatatgaatgttcaccagccagtaaatgtatacaaaatggggatctatgaaaacagtgaggtatgagtcagcaatttaaaaacaacaccccatcacatggacgagccccaaatgcattaaaccaagtgaatgaatccagattttaaaggctacattttgaatgattccgtttatatgacattctttaaaaggcatatcagtagggtagagaatagattagtgtttttacaggaattaaatagggagggacagttgcctaccaaggaacatcaggagggaatgttttaagtaatggcacttggtagtgtcttgactgtggttgtgggtatatagctacatacatctgtcaaacctcaaataattgcatatgagaaatactcagttgatgaaattgatggtacctaaattcaaaatacactagagatgacactacgctctcactagaattgttaaaatataaagactgacaataccaagtgttaataaaggtgtacagctaccggaattctggtgcatggctgggagtagtggtaaaagtcaaagccatttggataacgattctgcaattcctacaaaaattaaatatgcaggtattatttgaactaaaaattccacatcttgtgtataaatgagtataaaaacatgtctataaaaagacttctacttggatacctatagaaaaaacctggaaaatcttaaacgtctatcaataggtgagtaaataaaagataatactacttagcaataacacattgtgaactacaggcatatacaacagcttggctcagtttcaaaaaatgattgctgagtgacagaatacagacacaattttttagtatatttctaggaaattctcaagtagacaaactaactcaccatgacagcgggtatattgatgatttcccagcatacgcgatgggaatggtgagctgcaaagaaacatggaaaaccattagagtggaagaagtgttgtgtatcttgactgtggcagtcacagcggggctgcatacacttatcaaaactcactgaaatgaacatttcaggtgtgtgcattttatttcatgtaaattatgcctaataaagttcactaaatacatccagtgaaattcacatcttcatatttaacattctgacccataaatacaatataatttgctttactattaagaccaaattattgcattcctattatgtgctacattcttatttttagaagaacttacaaggtattatgttacttattaaagactcaattccttatatattaagaatgcaaatggctgtctacattagcaaggacaaatgaacatttacctagataatactgttacaaagattttactaatatatggtaccaaatattattatgccctggattttgaggatttgccagatgagatggaaaatcatgtcactgaacctaaaattatttttatctataaacagaatgggccaggacatttagttgtgtgcttgtcaggaaggtgatagctgggtacagtcaaatctgtgccacaggatctaggaaggcagatttccaaatctcacataagagatcagcacgatcacattgtctgagattttttttttttttttttttttttttttttttgagacagaatctagctctgttgcccaggctggagtgcgttggtgtgatctcggctcactgcaagctctgcctcccgggttcatgccattctcctgcctcagcttcctgagtagctgggactacaggtgcccgccaccacacccggctaatttttttgtattttcagtagagacagggtttcactgtgttagccaggatggtctcgatctcctgacctcgtgatccacccgcctcagcctcccaaagtgctggaattacaggcttgagccacagcgcctggcctgtctgagacttctgacaaacaagagggagcaagagggttaggaaacctgtgaaaaactaaattccaacaagacaattaatgcccaaacaagcaactcacgaaagacaaatagtcataaacataaaaactaagcctgaaattttaattttgtctgtatattcccctcatattatcggaaaatattgtctttgggccacatgtaactgtgagaagcacattttttcatgaaaggaaatgctaatctctatgatgaggaccttaaaaaaatcgctcctgcccacactacactgagaggcagcattaaccgaaaaggagtttcttctacactggttcatagaacatgtgtccttctttatgttttacgtgaagatgctgcatggttcttattttggaggtgtcattgaaactgcaaatctgtatactatttatcagggaaaaattctatagtcacatttctttaaaaatacccaatatgctaccatgacacatggcaaactcatcagtgtccgcagctctaaagccagacagtgtgtgtgtgctaaggacatgaggctatggatagggaccatctcaagggtaggggccaggtcagtgctatctcttcttctctccatccccacctacatacagatgctcactatatatttggtgaatgaatgaatggctgtcaccttcactgcacctaggaccactcttcattttttcagtcccagacactcccatagaccctacagaatcctacatcctgcaggatcgactatctcatggctcaagatgaggctgtgactgtctggggccagaagtgaccagttcccagacgtaaacaatggttcacagaaaaacacttcagagtgagagggttttagacacaggtgtcccatgcttcagatgtccccagaggtcctggtccaggctctggcattggacggaagacccgaggtgggaggcaggaagtggtctctgctccttctctgctcccctctgggcaggtctctgaggtcacttggctttgcagtctccctccactctgtgcagaggcggatgacctctgaccacgtgtgggtttgaggttcctcttctgtgaactgccaagatctcatgctcctccccacagccctcttctctgctcacacaggaagcccaggaagcctctgcctcagagatgctgccgctgctgctgccgctgcccctgctgtgggcaggtgagtggccctggggagaggggccgtggggatgagcccatctgaccctcatgtctccacagggccctcgctcaggatgcaagattccggctggagatgccagagtccgtgacggtgcaggagggtctgtgcatctttgtgcactgttcggtcttctacctcgagtatggctggaaagattctacccctgcttatggccactggttccgggaaggggtcagtgtagaccaggagactccagtggccacaaacaactcaactcaaaaagtgcagaaggagacccagggccgattccacctcctcggtgatccctcaaggaacaactgctccctgagcatcagagacgccaggaggagggacaacggttcatacttcttttgggtggcgagaggaagaacaaaatttagttacaaatattccccgctctctgtgtatgtgacaggtaaggcacgggctccaggagtggcacaaggggaaggttatgggggccactgggaagggctcagatgggactcatgtcctggaatggggatgggaataaagcacgtcaggctcaggggaggaactggaccagagcctgagcttcccacagggctgcaccttggatccccctcctgatcctgcgtccccacctctgtccacaacagccctgacccacaggcccgacatcctcatcccggagttcctaaagtctggccatcccagcaacctgacctgctctgtgccctgggtctgtgagcagggaacaccccccatcttctcctggatgtcagctgcccccacctccctgggccccaggaccctccactcctcagtgctcacgatcatcccacggcctcaggaccacggcaccaacctcatctgtcaggtgacgttccccggagctggtgtgaccacggagagaaccatccagctcagtgtctcctgtgagtgatggggccaggatgcctgggtgcctgagggtgtgaatggggagaggaccaggagagaggaggtccaggactggggccacttggtggctgtgtcttggaggccttgctgagtaggggaactagaaggatccaagctgtcaattgccatttctgcgggcttctagaggagcgcctaccttcatctcactcccaccccaactaaatgagaaatcctctcttgctggcttagatcctctaatgaacccagtgattgaagcctccctagaagacggcacaggtaggacagagtccccatctggaggctggaggagcagggccttcagctcagggaagagctgggctcctgcctcatcctgactcaccatggtaaccagagactccttgttggccaactcagggaccctccctatcctcagctcccatggacacctgagcacctgtctgtagggaccagccccacagggtcggtaggtttttctctcatgtttggagacgagggagttgcagaaataaagacacaagacaaagagataaaagacagctgggtccgggggaccactaccatcaggacacggagaccggtagtggccccgaatgcctggctgcgctgttatttattggatacaaagcaaaaggggcatggtaaagagtgtgagtcatctccaatgactgataaggtcacgtgagtcacgtgtccactggacagggggcccttccctgcctggcagccgaggcagagagacagagagagagagacagcttacaccattatttctgcttatcagagaattttagtactttcactaattttgctactgctatctaaaaggcagagtcaggtgtacaagatggaacatgaaggcggactaggagcctgaccattgaagcacagcatcacagggagacggttaggcctccagataactgcaggtgggcctgacatgagtcaggccctccacaagaggtggaggagtagtcttctctaaactcccccagggaaacggagactccctttcctggtctgctaagtagcgggtgtttttccttggcactgacgctaccactagaccacggtctgcttggcaacgggtgtcttcccagatgctggcgttaccgctagaccaaggagccctctagtggccctttctgggcatgacagagggctcacacgtcttctggtcacttctcactatgtcccttcagcacctatctctgtatagcctggtttttcctaggttataattgtagaacgaggattattataatattggaataaggagtaattgctacaaactaatgattaatgatattcatgtataatcatgtctatgatcttgatctagtataactcttgtggttttatatattttattacactggaacagcttgtgccctcagtctcttgcctcggcacctgggtggcttgccacccacacctgtccgcagactcctccacagactcctccaaacacacaccccttggccccacaataaggacagagtgatattcatacagcaggactagcctttgagccccttatcatctacctcctaaatactcctccagcctcaactttaaatttttcccagtagtttaatgtacttctggacaggtgatacaatcgcatgggcaaaaatgctaaatccatagcagagtctgttctcagatgcttgtcctcctccccagaatcaaagagtgttcatcctggctgctctgagccctggtgtattctctggaaggatctcagaggtcgtttggtatcagcagcacagactatcctcactctcagactgtgtagtgttccattgaagagttggatcctaattctgtatatatcttcttgaaatggaatatcatgtttctaccaacagaaacaaaggattgaacagtcttctatctactttgccagtgtatgtctatgtctgtggaatcagttacttaaagcaaaatagctgggtcttacgttctttctgattttgagagatatggccaaattgttctcagtcaatggtggatatgtttacatccccaacagcatggggtgacagtgttttcttttctttttcttttctttttttctttttttttttttgagactctcactctgtcacccaggctggagtgcagtggcgttgtctcagctcactgcaacttccgcctcatgggttcaagcaattctcgtgcctcagcctcccgagtagctggtagactacaggtgcctgccaccacgcccggctaattttttgtattttagtggagatgggtttcaccatgttgcccagggtggtctccaactcctgagctcaggcaatctgtctacctcagccttccaaagtgcttggactacaggcataagccaccgcacccagccgaaagtgtgtcttcatcaacccaatgtggaatgaaagctttcgctttttgccagtattaggtgaaaattgttatctccatataatttttttatttatatgcactttttaattgagataaaattcatataacattaaattcacaatttgaatcattttaaattatatgctaaactggcttttagtcacatattgtacaaccataaccatgatctaatgccaggacattttctttacttcaaaaatccactctgtacccattaagcactcacttcccattatcccctcctctggcaagcactaatctgccttctgtctctacagatttgcctatttcggacatttcatataagtggaatcacacaaaaaacagcctcttgtgtctgatttttttttcacataacggaatgctgtcaaggttcaccccagtactatgcatgaatacttcattctttttgaaacctaatatcccattgtatggagagaccatgttttgctcattcattgttcagttgatagacattagagctgttcacactttttgactgttactaataatgctgccaggaacattcatgtacaactttttgttggaacctatgtttttatttctcttgagcatagccctaggagtgtaatttttaggtcatattgtaactctgtgtttaactttttgaggaaatgccagactgttatccagtgtcagcaccactttacattgcaccagcaatgtacagagttgcaaattctccatattcttttgaacattctcgttttccttttctaaaagaactatggtcttctagtgcatgtgaagtagtaattcattgtggcttcaataggcattaagatactgataaatggtattgaacatattttcatagaccaattgatatttgtatctttttggagaagttttcactcaagttctttgtctactttttaataggttaatttgggttgtttgtaatttgagtggtttgtaaattacatgccctttatatatgctggatactacacccttatcagatctgtgctttacaaatgtattttcccattctgtgggttgtctattcactttcttgatagtgccaatcaatgcaaaatagtttttaattttgataaagtccaaattatgtatcatttcttcttccaactgctggacagtcagggaacagcttagaatgagccctgggctgatgtgataccacatccaaggatgcaggaaggatctgaagaaccaatgtccaagttgtcttgggagaggaaggacatggtttgtggtttagcaggtgaatgggcctcatcccacctttttgcagggaaatcaggaaccgtggaagaggtggttgttttggccgtgggggtagtggctgtgaagatcctgcttctctgcctttgcctcatcatcctcaggtaagcactgcctgaagaccaaggacaggcatggggagggcagaggacatgatgctgaatcccagaatctcaatcctgggggtatgcagacagtttacgtggtcctggggccaggctggaggctgaattggtggtgagaattacacatgggccatttgtggtcagtttgtgtctgtcccaactgagggccaaatgccaggatggggagcttcctgttgtcatcaaggaagtctagacctgctcttcctccctgtgatccctccagcctctagcagggcacaggaagttgagttggctgccctttgctcccttcatgtggccacacttacaggtccttgtctcttcactcaatgtcagtttccacaagaagaaggcggtgagggcagtggaggttgaggagaatgtatatgctgtcatgggttaatctctcaggtgagtgatgtgggcctctcactcttcaacatcctgctggataactcctccacaatggcctccaggattgctctgcccatcatggccaaagttaagccaactgtcttcctcctcaaacctacttttcctgggatgtgggttcttcatcctgcagatgacaaagaggcctcatctctaaagtcagaacctgggtgtgggtctccatcttgacccccctcccttctctagatcccataaattactagctcttgtccctccttctcctaagcagggctcatcttgatgcccttttctccatcctgaccctggtcattcttgcggcctcacctcttccctgatcactgaacccttttcacctcctgcctccatctctccccaacacaggcctccagactgtacttccagatgtctcctcatccagttcctccacagtctgaatggccatgtttcctcttcattgctggagaatgaagtgcaaatgccactgcctggactgaaggcctttcacgatctgtcttctgctggactctgctcctgatcccccttctccttgcatcacccgaagtctccctacacccaccaggccaagccctctgtgattctgagactttgcatgtgtagttacttctcctgaaatggccttcctccccattcctgccaatccaggtccttatcatccttcaggttgtcttaaatgtcatccaggtgtgtgtatttttatgtaatccttgtatgatattaagcggagatgtggcatttgttcattaatttgtagacatattcagtaaccatactgaatacatataatgactatgtgccagcatttccgtatgtgcaagaagttcatcaatagatatagactcaaagagctctgtcatcaagctgttgttctgaagagcagaaggatacaaataaaaagaaataagtaaaatattttttcccatgttggatagagatatttgtttagagaaaaataacacagggaaataagcacagactatactgggaaacagtttctatatctgatagtggaaagaggtgacatttaggcaaagacgtgaaggtgctgaagaggcgggctctgagtctgaataagagaaaagcatcccaggaaaaggataaggggaagagcaagtgcactgctcagaggcagcagcaggcctgggggttgtgggctcaaccagagccccatgtcttagagcagaggaagggtaaggagggagcagcaggaaggaagctgcagactgcgtggggtgctgcagcgcgcacaggagcctggagcctttgggaagggcagagacacaactggactctcactctgacctcaaatgcctgagtcagagcaggcccaagtgggtcatggcagccacaggaagacggggaaggcactgctgggtcctccaggaggagggatgagggctgagccagcgaggcagggtggggtgaggacatgtttttggatgtgtgtggaagatcaagctaataaggatcacaggctaactatgtgttcagtgaggggaaggcaatacaaaggacgaggccggaatgttcccctgggcacctggaaggaaggagctttgtccatagaggactgaagagggaaggactttcctagagaatgattaattctgagaatccacctgacatcagaatgggactaggagggagacagccggatgtaactgtcaggagctcaagagaggggtccagattggagatgttacaatgcacattcaacaacttggttcagtttccaaaaatattactgctgagatgaaagaatacagacacaaatgagtacatttctaggaaattctcatgtggacaaaagtaactcaccatgagagagagcatatcaatggttacccagcacaggaggtgagaatggtgagctgcaaagaggcttagaaaaagcagagtcatgtgggatatgagaactgagcacaggtgggtaggaaatgtaggaaatgaagttggagagagatggaggctacaaatattgcagtgtcctgagtccattatacttatttatgcatttgagcaaaagagtgagatgaaatgacacttactttagtggggtcactcaggctgcagtgtgagaaagtatagatgagaggagaccagattagtggatacagagaatccagtgaagagatgacgcagacatagtcctgggtaaggatgatgaatctcatgtggagaagttgggttctggacacatcttgaagatgaagccaatagtatttgcgaatggagtgacggagtgcacgtagggtaagagcaaagatagctcgtggcctctgcttgataggtgccacagatatcacaggtgagtccacagatatcatagatgtcatggatatccatgaagacatccatgacctcaataatatcatggagagtctgattacacctccatagatgtcacagatgcccacaggtgccaaagatgatgcccatgtggttacccagaatggagacttaaataatttaactgccaacaactaaaattgccaaccctgcaggaggagaatattcttaagtgtagatcaaatattgttttggttactgtaatttggaggtggtcccgagccacccacgtagggattgtaggtagaaggcaggagtctgaagttcaggaaaggggtccaggtgggagatacacaggtttgggagcctccacattaaggtttgatgatggacgaatccacaaagaagagaaggggtccacggacacagccacaggaccctccagcatttagtgtcagggagaagaggtggaaacagcaagaagactgtatagagcagctgctgaggagaaatgagtgaccaggagagtgcaagttcaggtgatggtggccaacgggggctggagtttcaaggagagattggtcatttgtttcaaatgctggtaagtctggtaagatagggtttgagaaacgactatttgaatttagctaagttgtatcacaactggtattgacaaaagcagatctggttgcctggtagaggaagatctcttgactagaaagagttcaagagagaatggaaggagagaaggcagaaaccgtcagtgccaagtactatttggagaaacactgcaccaaatctagaaccaagaaatgggcctgcagcagaatatggtcgtgccctgtagacttgccatttctggcagcatctgctcttgtgtctctcatgatactatgttccctgtttgtgtagggcttttcaccccttgagttaactgcattcccatggcttcccctaccacactgtgagctccacaaggacatggttagatctaattaggcctccatcattctactgtctcctattcagctgcacactgtcaaaatttacaattacctgtatgtttctgtcttcatcccctcaagtactggaagtcacaacccccacccctgctctggtctgctttgctccctcctgaggatccagtgtccagcacataggaggtcccagagatctggggttcagctcaggttcaacagatgtatgacctttgtaagtaccaagtatcaaccaataagtgttaccagtgttgcttaactgagtaagtggagccttaattcagaaacatttgatgaaaaaaaatggaaaagtaaacaaacatcctgtcaggttcaaattttcttaatggactctctctgcttactgtccagccacctccccactgtcctgctctgaacaacttcttttctctccacatggaacatcagaagaggtccaagttacatggcccctctgacctctgaagctcttcaggggctgcccccaccatggggtgaggagctgcattatgcttccctcagctttcatgggatgaatccttccaagggcacctccactgaatactcacaggtcaggacccagtgaggaacccacaagagcatcaggcttagccagaagatccagatcctctataggcagggggccaaaggctgattattggagatttaataccccacaggcaatgggtttatagacattatggaactttcctgctatactaacatcatcttagacttttcaagcaaggagtcctggaatcaaatctgtgctctttcatttgctaagtgtatgatatcatgcaagcttcttaaccttccatgtctccattttgtgctctgtagaatgggtgcaagacgtcctatctcagagatattgtgaggattaaataaagctacacatgaaaaacaccactcctggtgcatagtgacagtttggtgcataacggttccttccccctcgaacagaaggcaatagtgacatttggtccagagtcgtgatggtctcatccctgaaactgtatcagcaacatgtctgtctcactcgatgctcaaaaccccaccagagatgtcttccctgacttgccctccaacatcatctctctctactcctgaatcttttctttccatctcacctgtctgctgtcaaattttctgtctcctttaggtcctgctactggcaaagccagatattagcactttgggaattttctaaaactcagggctgaacacagtcaaaatagttccctagctcctcaacccacaagaatttgaagcttctcaacgtgaaattctaagtaagggatcagcaaacctcatttgtaaaaggccagacagtagatattttcagctttgcaagccataaggtctctgttgcaactattcagctctgccattgtagcaccaaagcagtcacaatctgcaaacgaattgtatggctgtgttctagcaaaatgatatttactaaaacaggcaccccacgggctgtagtgtgctggcctctactctaggttcccctgaatttcactcagtctacttctcaatggcacagcctacactcaagccatgctctgtggaccccattcagatgcatctctccctgtgggtgtgcatccacgtccctcctccatgaaggactgtcaccatgccaccatcaggctaacaccttcttatttttcaaaatgacctcaaaagtggatgtctacatcaagaagatagagggaagcagaagctctaaccaccttcctaaaaagcctaagtgaaataataaaaatcatttttagaaaaccagcagcacccaaaccatgacggggtgaacgcattatgccataagttcataatgacccttaaataaacagatggaagattctggtgttgctttaaaaagccatgatgccaaaacctcactcccttatccctcaaagggacagctgagtcacatgtctttctatgataacggctggctggtgatagggatcaatctgtccgctaaaacattaaaagtttacaattagatttccggtccagacaagatgacatcggcccattttgtccctgctccaaccctctaagcaaaactataaatcctgtagatggttcaagagacaccaaaggagaactctgaagtgtgataagaagaagctgagctggtttaagaccccatgactggaggaacaacacagaggccagggatcttgcatctcccccgacctgagggaggacaccccaactcatcatttcacagcccctgacccagcagcagaaggcagctaggcgagctcctaaggttcatcctctcctgagtggaaggggatcccccgaccaacaacatcaggagagtcccacatcactcaaaaaggggatcagtgtgagccagaaacaagtggccatgaagcgctatcattctccatcaggcctgaggctctcgtttccagcccagagatactgagaccagtgggcagaactggaaaaagagatccagtcataatgtctaatattcctgaccctcggtttgctcctttatcaactgtaaagtctagtctctcactttcagaagtgtgtgtgtgtgtgtgtgacagagagaaagagagagagagagagagagagagagagagagagagagagagagagagactggtataaagcaaggtatttaaagagcagtacagagatcagtaaacaggagcttaccaagcctcctccttccctgtggctcagccaggtggcatggacagacactgtccacaggagggacactacttgtgagttaactggagcagtaggaaaaggggccagagagaagaacccagcaccacccagtcctgattgtctgccacacccctgactccatccatccctctcaagcaggcctggatgcttctcacccctctacccttctgggctaggactaggacgctagcctctgggttcaagaccttctgcagagttgggaagcatctgagctcaaattgtcacacacagtgacagctcccctgcctgggtcttcccaggggccagaatgtctcctagtgggtggaccatcatccctgggagttgtgaggcagaaccttgatcagactccagtgcaaaggtggcaggagcccagggaagggtctggtgacttcctaggttaatgaagctggtcaggggtaactgagaccctccagggtgtgctttcatcctcagacttgggctccttactcgatatgggtattaaccagggattggtgtagttccgggaaaaggatagaatacatgggtatccccagtaattagatgggaataataaagctgatcttgggtatcattggtaggaaagtgttaatcactcaagattcttaggatattttacagctattacaagaccttgggaaacaaagtttccttgtgatgttgcagctgtcctcccactaggcctgaataagtgcaaggctgctacttctctttctccatctgagcagattttcactttttcactctgtgaaaagattttcctctgtgttttctggcatttgcgtctggagccttctgttctctctgtgtgtgtgatctcagacactccaaggctctcacccctgatttctccctagacacttcctgcagtttctgtctaactcaggctgtcctgatccccagagtcatgaagtggcaggaagtctgggccctgttgatagggccctgagacctacagagaagaacttcatgcccttctaacattcccctatgtgtgcctttctgagggctcaggggtgcccatgcaggggcctggcttcctccacacctgtggcctttccaagatctattacaccaggtgatcacaccctccccaaggtaatcccttatctaaccttatgtaagtcccccaaaccctacaacagggctcgccagctggtcctccccagagctagcctttttttttttttttttttttgagatggagtctctgtctgtcgccaggctgcagtgcagtggtgtgatctcagctcactgcaacctcagcctccagagtagctggaactacaggtgcatgccaccatacctggctaatttttctatttttggtagagacggggtttcaccatgttggccaggatggtctcaatctcttgaccttgtgatccacccacttcggcctcccaaagtgctgggattacaggcatgagccaccgcgcccagcccagagccagccttttcaggcatctgacatcactactgtttttttcctggcagggttggagacctccagagaaggaaggtgagaaaaatttgagttcctttctccctcaggacagaggaagatcctggacatgggagcccgaagggaaggtccagacatggagactccatgattattagctcccaaacctctctcttctctcctaacccaccttcacacatcagagaagctctttgctgatttggccctgccatacacagaaaaaccaaagaacttctcttcactctgatatctggcttccaaaactattccctatagttgtgagtaagcaaagcagggagaaggaagacatatgtatttttataatgctttatttaccaaaattaaagaagtactttatgcaagattgtgctacttgtgtgtttacctttctgtagatttggtaagcctgccaatcaacacatatttatcacctactgcgcgcaaagcaagtccacagtgcttttgaaagttgtacgtctttgccttcagggactcactttccatagtgggacctcagtatgcagtgaggaaacttatcctctcacctgctccctgcccacctccaatctgttctccacagggaagacagagtaaattctaaaaatccacttttctgctcccttcagtggcttcccatcacccaaatgggaatagcagaaattcttaagatgagtccaaggtgttacatgcagtatcatatatatgtatacatatatgtatacatatatatgtacatagtatatgtgtgtgtatacatatatatgtacatagtatatgtgtgtgtatacatatatatgtacatagtatatgtgtgtgtatacatatatatgtacatagtatatgtgtgtgtatacatatatatgtacatagtatatgtgtgtgtatacatatatatgtacatagtatatgtgtgtgtatacatatatatgtacatagtatatgtgtgtgtatacatatatatgtacatagtatatgtgtgtgtatacatatatatgtacatagtatacgaggagatggagttggaggttcagtgaagatgtgcaaacctggatttcctcggaccctggagcagagaggatgaggaacgtgtttgaggccaaaggggtcaacgggtgggtgggggtgtgggtgggggtggggggctgcagtcaatcactgactggcttatggatgattgacataaaggctgggttgccagggagcccagtgactcacagcgtgaacccgattacctggtctacacaggcggtaaccgtgtgactagcgactgagtgccttacaggggacgacctcctaagaggctgactggcaggagcccagctaactgctggccagggcaggccgtgggggcgcgttacctgattgtctgaggaactggctggcgcggggactgacgctgactcgcggggcgctgccctggtcacggcctcagctcctcaccggccgcctcactggggcgacggccgctggctgccctcgggctgagcaggtgactggcgtggtggaggcggaggaatgcgcggcgggctcctggtgatctcctgagggtccgcggtcttgcctcgtgactgatccagaatgggccttggaccccacaaggggctcgggggcctcgcgggcctgagggtgacactggcggcctcacgggcctgggctgccccacgctccaaggggtcagctgactgagggacgccctgctctcctggaagcccactttgcgcagtcccgatacaggtcccgcagccgaggactgccggggacgcccacaggccaggcactgctgtgaggccaggaatcctccatcagcgcgcggagaaagcggtgtgaaggctccgctgtcgccctgggcccagcccgcgcgcctcgcacgttgtgcgtctaccccacagccaatcagtggctgcacaggcctctttagtagccaatcagcagcttcaggtgcctattacgcagcagatctgcgaggcagatggagctttcccccacggacacttgcctctgggagctgacgcacagccaatcaggagctgaaagtgcaagtccctccccgcaccttcaggcccagaggaatcctacgggcttgagccaatcagcagccgcgggcggtgccaggaacgtttgggcgccaaatttcttctcagcgagtcctttcctgaccgcgttcttgaaaccacgctcctctccagccagccctgaggactccgttcctcttgattaaatctgctttattttctcacactttacccactgcacactttcgaaacacttcttgctactcaacaatatttttgtggccgccccgctaggatacaggcgcactgcgggcagaattttggccgtttttttctcgccgctgtttcccccacggcctttggctgcgccctgctcgctgctctgggatgaacttgcctttcaggcagccctgcccatctctcacctcccagctcacctgtcccacctgcccgcggatcctcaccctctccgctgggctcccacagccccgtcctccccgctggctcagcccggaccccgccaggctgtgcccgcctctgtctcccctgcccgtggccggtgcccctccaggctccgcctcgcccagcccagacgcccaggcggctccgccccatagatgggaggcaactgcccagggtgcaggggcagcgaggggctgcggctgagagccctgcccggtcctggggagggagggagagtgtgggtggagggggcagccctgcagatgtcagagacagggcggcagcagcacaggtttcctctggtgaggagcccttcccttcccttttctccttccatcctctgagcatcccatgttacaggctgtcccagacccctgtggggctctgcatccaccgcggtccacaccgggctgtgctcacaggaacacatcgaatcctctcgaccactccatggactctcttgccagggccgccttgagaaaggaacacagaccgagtggcttcaacaacgcctttgttttcccacccttctggaggctggaagtctgagaccaagctgtggtcagcgttgcttccttctgaggcctctcggtggcttgcgggtggcatcttctccctgtgtcccacgtggcctttcttctgagcatgtctctgtcctaatcactaatcgctcctttttttttttttttttttttttttttttttttttttttgagacagtgccttgctctgtcgcccaggctggagcacagtggcgcgatctcagctctgtagcctctgtctgttcaagcgattctcctgcctcagcctcccgcgtagctgggatcacaggcatgcgccaccatgtccggctaattttggtatttttagtagagacggggtttccccatgttggccaggctggtctcgaactcctgacttcaggtgatccgcccgcctcggcctcccaaagtgctgggattacaggtgtgagacaccgcaccctgcctgagatgatctcttggggtcacttttatctatatgtcttctgtttcccccaaaaaaatgtttcaagaaaacttacatgggtctaaggaggctccacctcccagggtcccccaccactccctctcagcctgcagccacacagttaaaaatagtcttctgtttaattcaggtgcacgtttcttctccaaaataatcctgcccagcactgagggtgtacgccccaggcctggggtcctcgctccatggctcctgttcacctggactcctgggagcagcacttgcaggagcaaagccctgggtccagcagacgccgcctgctgtggactaaccaggggaagtgtggctgaatgagatgccagcggtgaagaaacccctcctgatgtccaggtaaccacaacgaagggagaagtgtctgcccttttcaaattgacgccttctgtcctgaccctcctttccaagcctcactgaacaacagcctcagtttccccggcctcctgcaggctgggctcccctcagtgtccttggcacgtatcaacacacaaaatcttccacagccccgcatccctctgctcagtcctcctgagactgaaccctcaacctaggggagagcgaccccacctgcctgagccctgcactgaagctcctgtcatgggaagctcagatgtcaggagcctcattgtctccccactgcacagtgactccttggggacagcgtccagctctgccttgttgatctcgtcgtgcagaaagggggtgcccaccttgcagctgctgagggagggaggagaggctgcctgctcacaccgcttgcacccctgtctctcatggccctgagtctcacctttggcaggtctgacctccacaaacagtgatagccacagaggagactcgggggtctggccagatggacccagtttcaccctgcagaggcaagggtgagacagagaggcaggatgtggagatcagtctcggcatggggagggaatctgggtgagtctctcaccctgtctgagttcagggacccaggagtggatgtgggattgtagatgattgatctccaagggcggaccctgacagtgtctgggttgtgaagttcctcctctgaggaggtcactgttccgacctcgcccctgtcttcctgtggggcctcctctaagtcttgagccctcagttcctgagagaagaaccctgaggaacagacgttccctggcagccctggcacctacaaccccagacatgctgctgctgctgcccctgctctgggggagggagggggtggagggacagggacagcaagagaatggttacacactgcaagtgcagagggaggtgagggtgcaggagggcctgtgtgtccacgtgccctcctccttctcccacccccaggttgccttgactaactctccccaagttcatggctactggttccaggaaggggctgacacagcccaggatgctccaatggctacgaacaacccaaaacgaaaagtgaagaaggagacccagggccgattccgtctctctggaaacctgcagatgaacgactgctccctgagcatcggagacgccaggaggaaggaccaggggtcattttctttcgcatggagagaggaagcatgagatggaattacgcgtctaaccagctccacgtgttggtgacgggtaaggcgcaggctccagaagcagcacaagaaaaggtcctggggctgcagctcaggggtgggttgggacccctgtcctgggagggggttgggggtgaagcgtgtcgggctcatgggaggcactggaccagagcctgagcttccccagggctgcacctcagacctcccctcccgatcctgcacccaaccctctcctcaccagccctgacccacaggcccaatatctcctccctggggaccatggagtccggccgcccgggaaacctgacctgctctgtgtcctgggcctgtgagcaggggatacccctaccatctcctggatggggacctccgtgtccttcccgggccgcaccacagcccgctcctcagtgctcaccctcatcccaaagccccaggaccatggcaccaacctcacctgtcaggtgaccctgcctgaggctggtgtgaccttgaccaggactgtccaattcaatgcgtcctgtgagtgctgggccgggatgcctgggtccctggtggggtggggtgttgctgagagcagcaggattggggtcaagggtgctggctcccagaatctgggcttggagtggctggctctactttccccatttacgcggctcctggggagacagggccagtgtccccagccctcacagtgatgtgggtctgcgtgtctttctgtcccagaccctcctcagaacttgactgtggctatcttccaagcagacggcacaggtaggacagagccccctccctggggctgggggagcaaggtctgcagctcagggcagggccaggtcctccgcatcctggactcaccctggtgacctgagacccccttgtgggtgaatccagtgcccctgcccatcctcagcccctgtggccacctgagcccctgttcccatcccgccctcactccccttagaatcctccacacgcaccctccttggccccacagcaagggcagggggacattgatacagcagggccagcctcgagggtcctgatcatcaacctcctgaacacacctctttctctacagcatccacagccttggggaacagctcatccctctcagtcctggagggccagtctctgcgcctggtctgtgctgtcgacagcaatccccctgccaggctgagctggacccaagggagcctgaccctgagcccctcacagtcctcgaaccatgggctgctgaagctgcctcgagtgcacgcgagggatgaaggggaattcacctgccgagctcagaaccctcggggctcccagcacatttccctgagcctctccctgcagaatgagggcacaggtgggtaggggaggggctggaggaggagaacacacctgcgccaccctcatgggccacccactgcccgtgagcttcaagggggagctcagctctggtgtgtgctcagctgtgaggcctagaacttccccacaacccagagcatcactgtcctctccccgccaggaaatgggcgcggggtggggagaggggaggagtgggtcttggaggggaggagctggggcccggccaggtgtatctggggagacaagtgccttgctttgcagtgcttagactaggaagaggcacgtgaagcacttgccttggtaccaaatttaagaaccaaaactaaagcaagagaaataatactgtgacacgataatcatttttaaaaaataaaaattaatgcaaaataattccatggcgaatacaaatcaaaattttaaattaaaaaaaaaactgcacccagcactgtcatgcctcactggcctcaccagaagtccgtaatcctcctccttctgatgcccgctctttgtgtctgggaaagctgggaggagaatcaaagtcgagggccttacaggcagcagaaggtgaggagacccagttattgaaggtaaatcccagagataactccaatccatctgcaggcaccacatggcctgtatcaggagtgatgctgggggtggtcgggggagctggagccacagccctggtcttcctgtccttctgcgtcatcttcatcgtgtgagcattgaccctggggagggagggagacccctgagggagggcaggccaggaacagaatccctgaagccagagctggagggacctgcatggtcaagagcttaaagcaagggcaagaaggaggtcacaggtgcacggtgggaatttcacaagcatctttgttcgtgaggctccaagtctatggcaaacctcaggccccactagccagaaggcaggaacctgtgttctcaacaccggggtccctgggactggttcacccctctctcacctcagtcatccctccagccctttaataggaaacatggtggggcggggggtcggtccacccactacaccttgatcggtacagactgaaagactctggtctcttcactcagagtgaggtcctgcaggaagaaatcagcaaggccagcagcgggcatcagggatatgggcatggaggatgcaaacgctgtcaggggctcagcctatcaggtgagcgatgtgggcatctccatacccagcattcagcctggacacctcccacaggatggcccccaggattgctcagctagtcctggccaaagttgcctcctcacctcctcctcctacctacaagctggcttctcctgcaggattcccccatcttgctgacagcatggcagcccctcctcccagaccaagcatggaggaggattacatcctctctgtcctccctgtcttcctctacagctgaaaattcaccgttatcttgtcaatttgccccacaaagaacagctagcatcacccccgcccaacctgaccctctcattgctgaggcctcaggatcttttccttgggccttgtcacctccctacttctcacctccccttccctatctggagggaccatctggaaggcatcactgcccagttcttctgcatttggacagctgtcctccacccccattgtctagatcagaggccagcaaacattttctgaaataccagatggtaagtatttttagctttgtggactatacagttgctgttgcagctactcaactctgctgctgtagaatgaaatgagccgtagaccatgtgttaatggtgagttggactgtgttccaataaaactttattaacaaaaacaagcaatgggccagatttaatccaagggctgtagtttgccaacccctgacaaagcccaaactcctcagcctggagccctgcacgttctggcctgttaggcacctacctctccaggagggccagagttagggtaagaagagtgaggcacttgctttgaatgcaacatttaaggggatgccaaaaatctcagtaattgagaaaaactaagtttcatgcattgttttttaaaacatcaaaattaaatttaaaaaaaccaatgataagccaatatcaagattttaaataatgacaggttcaataaactgaagtggccgggcgtggtggctcatgcctgtaatcccagcactttgggaggccgaagtgggcggatcacctgaggttaggagttccagaccaacctggaaaaaatggtgaaaccccacctctactaaaaaatacaaaaattagccggacgtagtggcgggtgtctgtaaccccagctactcgggaggttgaggcaggagaattgcttgaacctgggaggcggaggttgcagtgagccgagatcacaccactgcactccagcctgagcaacaagaatgaaactccatctcaaaaaataaaaataaaataaaaaaataaactgaagtgaattaagaattatttaagatcatcacttagtcaagagaaattatcaagtagggcagtgttctcagttgaaaatgagagaatcaaagtcgaatttgaaaatattatttctgccttgcttccagtagagccaggaaagcagattataataaattctgctctaggtatacgtaaaatctttaaacttaaaatgatgttttattatacaccatttttcaatttgtcagtagtagctcaattatttaatgttccggataaaagtgaccattaaacatacatgaaaacatataggccaggcacggtggctcatgcctgtaatcccagcactttgggaggccgagacgggtggatcacgaggtcagaagatcaagaccatccttgctaacactgtgaaaccccgtctctactaaaaatacaaaaaattagccaggcgtggtggcgggcgtctgtagtcccagctactcgggaagctgaggcaggagaatggcgtgaacccgggaggcagagcttgcagtgagccaagatagtgccactgcactccagcctgggcgaaacagcgagactctgtctcaaaaaaaaaaaagaaaaaaaagaaaaaaaagaaaaaatatatatatatatgtatatatatatataaataaagagggacagacatttttctcgtgcctcaggctgcaattggctcagcaaagcacattaaaaatcctggatttctttaaatgtttgttctccatggagttttttggcactaattttgattttaaaatattacatgaggctgggcgcagtggctcacacctgtaatctcagcactttgggaggccaaagtgggcagatcactggaggccaggagttggagacgagcctggttaacatggcaaaaccccatctctactaaaaatgtaaaaattagccaggcgtggtggcacacacccgtaatcccagctactcaagaggctgaggcacgagaatcgcttgaacccgggaggcggaggctgcagtgagccgagatcacgccacggcactccagcctgggtgacagagcaagattctatctcaaaaaaataaaaataaaaataaaagggctatagtctgtaagtggccatctaggcaggcagggaagtgtaacctctggtaaaagttgaaagtcaggtattttgagggaggagggcttggagcaggagttctatgttggatgggttggctaaatatacatatttaacacattataggcagagttttgggtatttatgaaagggtgtcatgcatacgtgtgatggataaatacctaagttatatgcaactcatgtttattttggggtggagacttaatatttaaatgtattataattaagccatctctgtcaagagatgaagcagggactcagaggtatttgagtgtgtagtctcctacacacttggaggagctaatgagattagtaaacaccaaatgaggtgctcagtaagtgttaaatattggaggaaagcatgaaagagaccgacaaaaatgcaggtgggatgaatggaggacggatctcctgggcctccttcctagactctccccgcctcaacctggccccactgctctgttctgactcccttctcgctctctctgttcagggacccctgactgaatcctggacagacggcagccccccgaagcatcctccccccagccatggctgcctcctccttaggagaaggagagctccagcatgcaaccctcagcttccataaggtcaggcctcagaacgcgcagggacaggaggccatggacagtgaatacttggagatcaagatccacaagcgagaaactgcagagactcgggcctgattgggggatcacggtccctccaggcaaaggagaagtcagaagctgattcttctaaaattaacagccctctagagccctatgctgtgcggtaggtcaccagggctccctcctcctgcggaatcgaaacttggaccaacatctcccctttcccaggccacctcggccccgtccctgcccccagcttctgctacccaccactctcctctctatgtttctgaggttgactatttgagattccacatgtaggtgaggtcatacaacatttgcctctctgtgcccggctcatttcaaacaacataacgtcccctaggttcatccgtgttgtctcaaatcacagaatcatgcactgagtattttcaaagagctaagagaggattttaaatgttttcacacaaaagatcgatatttgtgcggatgggtgtgctgatcatgctgacttgatggttccatggtgtatccgggtgtggaaacctcactagggccgtctcaaggctactcggctactcgaggcagggatggaatttaaagcccgcctgattctgaggtctcttctctcatccggtgctgagtcaagcaaccagcaggccgggcacctcttagccataagtttgcaggaaacaatattcctcgagggctttgttttttcctgaagagggggcagcagtagcccagggtctcccggacgtgacaggtgcattgagtgggtgaaggctggggacctctgcgccaaagggatgtcatgtctttatttgttttcctcaaaatttttaacatgtgttttttaaaattgcaggttgtttatttgcttgtttttccttgaaatttgaaactagcattagcttttcagttgaggcaaatttacctaccatgaaagacgcagatctcacatgtgcggttccatgagctccgccaaatgggcacccctgagtcaccggctccccaaagacagagaaactttccatcactccagaaagatcctggggccctgcccagtcagtcctcagccctgagagccaccgcttcctggtttctgcgaccataagttactttccatgtccttgaacttcatgtgattggcatcacccagtatgtattcctgtgtctttttttactcagcgttgcgtgttctgagattcatccacgtcgtgtgtgtcagcatctgttcctctttattgctgagtaggacaccactgaatgggtacatcacagtttgtttacccatttttttttctgttcatggatatttagtctgttttggttttggtgattatgaatatagctgctgtgaacatatttgcgcaagactgtatcgaggtattttcatttctctccagtgtttggggcaggggatgggaacagtggggttggattcccatgcttggcgtgcgagggcatttgggatgtcctgtggagatggcattcagcagctcaggaaggagggaggggctggagatggacacgggaaacatcagggggttccatcatcctgatcatgggcgccggttgttttgggttgaatcttgtcccccaaagagatatgttcaagtcctaacccccagtatctatgtctgtggctttatttggaaatagtctttgcagatgtagccaagttaataggaggtcatactggatgaggtgggccctaagtgccatgactggtgtcccaatgcaatgagggaaattgaacacaagacacacatagggaggaaggccacatgacagcggaagcagagcttggggttttgctgccacagtccccagaagctggaagacgccaggaagaatcctcccagtgccttccgagggagatggccccgctgacactgtgattttggacatttggccttcataatgtcgaagaataaatttctgtggctttaagtcaccaaggttgtgggaatttgatagggaagccctaagaagccaacacacctgacaccaacacacctgctggcacctgctgtgctgcaacctggacccatcctatctccgcaggcctcaaagtgactctcaagagggccggctctacccaggccacagagaagcccgggggagctgctcagcaccatgcaggccagcaagcggaaggtcttccgccaccagcattgagctgcccgaggtattaatatcaggccaccgagacgctgctcttctctcatgcaggtgctatgtttacagtgctaattttgctggaacaacaacaaaaaaatcagttccaaggccctcacacactcaagatttttgaaacaaaattaaaacaggagagcaacaaaggaccacacaggaacggctgttcactggatcaagatgttctgcaatatgcagtgtattcatagtaacccatggggaggaccctgaggcagctctccctcttccctgaaacggtttcttaaaaagtagcttgtttggccgggcgcggtggctcgtgtttgtaatcccagcactttgggaggctgaggcgggcggatcacgagttcaggagtttgagaccagcctggccaacatggtgaaaccctgtctctactaaaaatataaaaattagctgggcatggtggcgcatgcctgtaatcccagctactcaggaggctgaggcaggagaatcgcttgaatccaggaggcggaggttgcagtgagccgagatcctgccactgcactccagcctgggcaacagagcgagactctgtctcaaaaaaaaaaaaaaagaaaaaagaaaaaggccgggcgtggtggcttatgcctgtaatcccagcactttgggaggtcaaggcgggcagatcacaaggtcaagagatcgagactatcctggccaacatgctgaaaccccatctctactaaaaatacaaaaattagctgggcatggtggcgcatgcctgtaatcccagctactcaggaggctgaggcagaagaatcgcttgaacccgggaggcggaggttgcagtgagccgagatcatgccattgcactccagcctgggcgaaagagcaagctctgtctcaaaaaaaaaaaaaaatgcaaagtattcttaaaaatcctaattctgcaggaaagttaatgacgtttggcttcaatacgtggccatgcacctttccttagctgtacaggtgagaactggaaaatctgcaatctgtgactgtacatatatcacactctgcctgctgtaagcaattggtttgtgtaggttccatttgccctgttggtcccaggtgagctgttcattcccttcagaccccaagtaaataagtgaaagtctgttagcaagttccagcctgatgagaggggcctcacactgagaaccccaggcttcctttccagggcattatcggcagttgcctatatcagtagctgaagaagagattcatccaaaggaataaggggaccccgaaaaacagacttcaccctttcccaattgcagcctctgctcccacctgggcttctcacttttccatctctggatctctgtcttgtctgttgcctatcgagtggattcaatggccaaacaactgcagtgaaagtgaaaacagacaaccctcaaggtacaggaagatcagcaggatgacaattattgcaggtaaggattcactgcattcagtccactgtcctcggacacaggagataaactgaaatccacagagaatcagaccgtgggctgaagacggaactgtctacataggaaagagcacagaaaactcagattcttacctcctgcacaactgctcacccacaggctctggtgacccgttttgcaaacacatcttttgcaagtacagaagtggtgggcacgctctggctttgtagctggtgggccagttcaggttcttgacttcactaggcaaaagaattcgagagtgagtccagtgtaaaagtaagcaagacagttaattgcaaagtgaacgtgcactctgacagctggtcagagcggctgctcaaaggtgagacagcactgactgacgctggggaaacttcctttaggggaatcttctgtgattactcatgcgtgggtgggacggtgttgctcttaagcgtgttctgggtggtctgttaggcccgcatgcgcaatggctgtacatgctagtgcatatacatcgctgtctcagcagcaccttaagtctccacgtgagggtgtgttttcactattataatgagcataggtcagcccaaggacactaactaagcatgggtttctgcacttgcacgaatttggggactttcccttctgcccttctacccccttgctgcaagacgttctgaccatgagcccaggatgttctctccatctatttagcaagtttgtttccctttaagagaggctgtgacccgcctgtctaacctatctccttttggtacagcagcacttggagcaggtgtagatcacttctcggggctgcagctgcacactctccgtgtattcttttgtagcctttcctttgggtatcgccctggggtcggtgagcgtggttcccagctaggacaacaggcaaacgccgccaagaggttaagatgaccccattgaccacagagcaccagaagtctttggaaggcagcagcacaacaaacgtcaccacaaagtcctcacagaagaccagaagccacgtcatgacagcgcggatcatgccacagccgttgcaatgacccagaccccatttgccacatcagcctcagagaaagaggaggatgacgaagagtcgttattgtcattttcagtcaggagaggaggatgctcggcaggcacccagagacacctgaccctggccgtgcaagaattctgaggagtgtgtatcaggatctagcgcataatgcttgggtactttagcaccaaatgtgtaagatacactcagaaatgatttctaaacatcacttgaacactttgtgccttttcttcaggatctaaggtgcatgctgtcctgtgtgataggatctgaggcccaggcggggtcggccggcgctgcagctcctccctgcctcctgcagttgccaaggctgggatgcatcatgcagctgcactcacgtctgggccagagtgggcccggggctcaactctgtcccctccatgccactggccagttagagggagatggccaccaagcagacgctggagcccagagcggcatggcccccggaagtgtcacccaatttttaaattactggtcctgttttaagaccagctgctttccccctcaacagggtactcttcccttgtaccattaaatattcctcagcaagtccaatttcaatggctgcagggcatgctggtaaaatcccaaacccaagttcgtataaccagtgtccttgttggagttttacattattcctaaattcactattaggagtataaactaaagttctctgaaaaggattttggaggaaagagactttattccagtgaacagtttgcaaaccagagagactccagtgtaaaatgaagggtgcgctccataaagccaagggaagtgtcaggtttagcgtcctgcccaggctcccaatcaggtctgtttatgcaaatgaaggattgaaactttctgagttctcattggtggacacagctgagctctgattggttggctcaggtgatctctgaaagtccggaagatgaaaatgctgtgggttttcagggaagtcagagtacgtgggtgacctgtacttggctctattttaaactcaggctcagttagccactcaggatccgtcttgaaggagtggctcattcaggttcacatttgttcacaggaataacactgagggttaggatatttgtagttttttatccctcacccccttcctcattctgagtctccaataatgtccattacaccaccctgttgcctttgcacacccatagctgagctcccacttataagtcagaacatgcagtatttgctttttaattcctgaattacttctacacaggggtggacttgtgtagacaggagcccacggagggggagtcgaggtgtgcacagattcgatgatgtgtttcgtactgagaaataacagagagagagaaagagagacagagaaggggaaaggcagcaagagccactcagaaatgttcaattcacagggtatctcaagcagtacttggaaatatatttgccttttgcttttataagaacacatactattttattttgttttactttaagttctggaatacatgtgctaaacgtgcaggtttgttacataggtatacatgtgccatggtgcacctatcaacctgtcatttaggttttaagccccgcatgcattacatatttgtcctaatgccctccctcccctgtcccccatccccctacaggccccagtgtgtgatgttccccaccctgtgtccatgtgttctcattgttcaactcctacatatgagtgagaacaacacacactattttataattgcagaagggatacatttgctacagaaaatttgaaaaatctttaaaaaaaaattataaataggccgggcgcagtggctcacgcctgtaatcccagctctttgggaggccgaggcaggtggatcaggaggtcaggagactgagaccatcctggctaacacagtgaaaccctgtctctactgaaaatataaaaaattagccaagtgtggtggtgggcacctgtagtcccagctactcgggaggctggggcaggaaaatggcatgaacccaggaggtggaggctgcagtgagtggagatcaagccactgcactccagcgtgggtgacagagcaagactccatctcaaaaaaaaaattattttaaacgattactatgtatttatgcctgtatatattttacattttgaaatagataaatattaaatatgtgaaataaatataaaattatttattggcccagcgcggtggctcacacctgtaatcccagcactttgggaggccgaggcaggcggatcacctgaggtcaggacttcaagaccagcctggccaatatggcaaaaccccatctctactaaaaatacaaaaattagccgggcatggtggcgcatgcctgtaatcccagctacttgggaggctgaggcaggagaattgcttgaacctgggaggcagaggttgcagtaagttaagatcgtgccattgcgctccagcctgggtgacagagtgagactgtctcaaaaacaacaacaacaacaacaaaaacaaacaccctaaaagcccaaggatatcaccccaggccaccttgcactgaatgggagcacttagggaagggaaattctttccgcgctggctccaagaacatcgtgttctccgtttgctttacatgaaaacatcttgcatggctcttattttggatgcattcctgaaatttcttgtgtgcacatactagacgtcaaaaaaggcttcataatcgtatttttttaatatttttttttttcagaaggagtctcgttctgtcatcaggctggagtgcagtggtgcgatctcggctcactgcaacctctgtctcccatgttcaagcgattctcctacctgtctcctgagtagctgggattacaggcacgtgccaccatgcccagctaatttttgtagtttttagtagagacggggtttcaccatgttaaccaggctggtctcaaacccctgacctcaagtgatccacccatctcagtctcccagagtgctgggattacaggcgtgagccaccgcacctggtccttaatcgtattttttaatgcccaatgtgctgcttgatgttgtgatgtatactctgggttgtagaggagagaagagtttccctgtactccctgagggttcgataactgactctaggaaataaacggacaacaggcagatcaacaggagaaaaagaatcaagggtcgtggggtcctgggcctggggatttctgcagctttctgcggagggatgagctctgactgtgtgagggtctgaggttcctcttccacgcagggctgagtctcctgctcctccccagcctctgggggtcctgcagcccttcccctccactccattccccttctctgctcacacagggatcccgggaagtcccgcctcagcgatgctgctgctgcccctgctgtgggcagtggggagaggggccgggggagctggacttcactgaccttcattctccacaggggacatggttcaggaggcaatattctggctggaagtgcctgagcccatgcgtctttgtgccctgctccatcttctcctcaaaaaacagctgcaatgattctaccgcagctgtggttactggttctgagatggggcccgtatataccagcacactccagtgtccacaaacaacccagatcacaacattcagggggagacccagggccgattccacctcagtggagacccccggaccaacacctgctccctggacatcacagaagcacagaggcggggatgcagggacgcacttgtacagggtggagagagggcttatgcaagatataattacagtgggaaccagctctctgtgcacgtggggaatcagggcaagaaagaacacactggtatgtactgagggccccctggggcaaggctgggctggtaccccagcttctcaccctgaaagggacccagggagatggggcgctggggagggtttgggggagtccagctgcctcagggagaggctgctcttaggtccacacttaggggtccccacctgcagggcctgggtctctgtctctgtcatctccagccctgatacagacactacatccacatccaggggaccctagaatctggacattccaggaacataacctgtaagaggaagacctccccccgcccactttctcttggatcaatgtggtccccacctccctgggaaagaatcctcactccttggtgctcaccttaccccagggttgcacagcttcacctgagcccttccccagagctggtgcaaccacggagagagccatcccaatcaatctgtcctgaaagcacctggccaggcccctgggtcctggagttcactgggttttgggagaagggggcggagaatctgagttactgggggactcttcttggggacctcttcttggggacctcttcttgggggcctggctggggtcaaagtggagggaacactcagacaccaccccgttgctcaggactgcccgtcacatggcaggtggtcagttactgatttctactccagatgctccacggaacctcagcatttgcatctcagggacggcagcacaggtgggagatgccctcagctctctgaagggggtgggtctctgccagccctgggcagaattgaggtctcaggggtccaataaggggaaggtcatcgagtgtgaccgacgctgcccctcactttcagcccatccagtctcgcttctgccccctccccaggcagagctctccatggtcactgtgacttcctagctgacaacccactgtcaccaccggcgtttcctctcccccatccttccctctcccctcactctcccatgacagcctcctcccggttccctgccacttctctggccatgccatccccgtctcccacaggaaccttatatccagcagttcccacagtggggtcttggcctccagccgctctctgcatgactcctccaggaagctcctccaccctagtggtcccagtcctacctctgccctgaagacccccataaatctctgtctggttcagctggtgctgagcacatcccactcccccttgggaggcccctcccacctgagaagccagagtcaatgtcctgggagtctctttgcacatccctgtatttccccagtacttcccatgagttggtgagttttgcaaacttgacttccggaaactgtctcaactcactcctttcctccatccccacctctggcctcgctcacctggacccgggtgatgcctggacctgcagcagcctccctcctggcctagcagcttctggtcttgctccctccagccgaccacaattcagatcccaaaaaggggtctctctctaaccagatctttccctgtcccttccctactcagctcctcccctggctcctgtggctcctggagaaagcccaagtgtgtcacctgtcttggttcctccaagtggccagaaccacgagggttagcgccctccacagttttgcacatcaaggccggtcgtcctgggacgttctctccatgtcccgatacggccaagtcctccgcatgtttccatgcccctgtcccgggaccattaaggagcctcccgacccctgcatgctgggggtcttcgcccctacttgcccttgcttgtgatgcttgtctcagaaacgcagtttcctctcctgagtctagagggaagacacagggagagaagggcctctcagccctgcccctctggctctctcggtctccctcgtccctcaggtcctaggcaatgcccactcctggtaggggcaggagggcagtccctacacctggtctgtgatgctgatggcagcccccctgccaggctgtgctggtcccagggcagcctgaccatgatcccctcccagctcttgcatccccaggtcctggagctgccccaggtggtttcaggagacgaaggagaattcacctgccgggcataggccctgctgggctcccaccccatctccctgagcctggctgtgcatggggagtgttagcagaacacctgattctaggggtccataggcaggggaagtgtggactcaggaaactcccacctcagtcaccctccagcttttcttatgcctggtaccacctgttactcaccccaaatctctggagaccagtgaggctcctgacctctgaccctcacactgctaaaggaggccctaagtgggggcaggggagtgggtagcgggggatggctttcttttaactcacagcctcacctggatctactgcaccagggaagcaactcttctcaaggtgtcctggaatttgagcccccaaatttggctgacttcacccatcttctccccaaaggaaccctccatagtgctggtctctcctctcagaatggtgtttaccccactggctcagaggatcccaaggggcagtgctactctgggtgactgagcgactgaacttcctcctcacagcagggctgaggtctgggctccagagcccgacaggggtgagggtcctttagaccacgtgttctgagactcatcctgcacagggctggagcaaagagctcctgggtgctccggccccacctcccatgcagaataacctctctccacccctcacctctgttccccatgactcttccttatggctctacaggagcggttgtcaggacaggtgaggaaatagatggatatgctttaccagaatttcaattattttccctgtaataccttgtttctgtcgcttactttaatgtgggtttcatgagctccaaattcattcccataacgtatttttacaaatcccataatatgtttattttacacagtcaatttttaaagagactttttattagaaaaataaactattttatgtttatccacatgtttaccacttcaattgctcttcattactttgtatacaaccgagtttctctatggcattattttcctttggccggaagatctcgtgtatttcttacagtataggtgtgctggcagtgaattcccttgactgtggtttgtctggaaacatttcatatacattcacttaaaaatacttttattgaaatttatatggaattctaggttaacatttttctttccagtaactcaaatggttttggcttgtgtaatttcctatgagaattctgctgtaatttttatcattgcttgtttgtttgtagtttgtggttttctctgactgcttttattattttattttattttatcttattttatttatttatttatttatttgagatggaatctcgctctgtcacccaagctggagtgcagtggcgcaatcttggctcactgcaacctctgcctcctggtttcaagtgattctcctgcctcaacctcctgagtagctgagattatgggtgcatgccaccatgactggctaatttgtgtatttctagtagaaacggggtttcatcatgttggccagggtggactcgaactcctgaccttaagtgatccgcccaccttgacctcccagagtgctgagattacatttttttaaattaatgctaatccttctcaaacttttctgaaaaatagaagaggagaaaatatgccctaacccattctatgaacacagtattacctgataataccaaagacatcacaggaaaatgcaactacagcccgatatcacttatgaatatagatgcaaaaagtcctcgagaaaatgccagcaaactgaatccagcagtgtataaaagactctacagaatactgagtgggatttatcccaggaatacaaaggtggtgtacatacgaaaacctattgatgtaatacagtacattaatagaatgaagaaaacaacatggaatcattttcaattgatgcaggaaaaatatttggcaaaatccaacactcttccatgttaaaacgattagcacacaaggaatagaaaagaacttcctcaatgtgataaaaggcatttgtgaaaaacccaaaggtaacattatattcaatggcgaaagactgaaactctttccctctaagatcaggaaagagacaaaaaatgcctactttaaccagttttattcgacatcgtactggaggttctagttagggcaattacacaggaaaaaaaaaagagaaataactggtatacaagttggaaaggatgagtatttcttatatatagaacattgtaagtatcccactaaactctcttaaagctaataagcaaattaccatatatgccagatacaagattataacacaaaatacagttgtatttctatacgctagcaattaacaatctgaaaagaattaagaacaccacccccatttataataccatcaaaaggaataaaatatttaggaatacatttacccaaggaggtgtaagtcttgtgtactgaaaaataaaaaatattgctgaaagaaaataaagaagacctgaatcaactgaaaaacaccctgtgttcatggattggtagaattaatattaagatggtaatattcctcaaatcaagattcagtgcaatccctatcaaaaccctaatggatgtttttactgacatgaaaaaaaaactatccttaaaattcatatggaatcacaagagacttcaaatagccaaaatgattttgaaagtgaaaacattgtaggactcacatttcctgattttacaacttaccacaaagtcacaggaattaaactgggtaggcacttggtttctcaagccgcctgcttggccctcttccaagtgtactttccttccttcctttctttcctttccttgctttccttactcttctaaagcttttaaataaactttcgctgccataaaataaaataaaaaactaggtggtaccgatactgatcaatggaatagaattgagagccagatataaagtgataaatttatggtccactgataattcagtaaggataccaagaccatttaatgaaaaacgataatgtctttaacaaatggttctggggcaactggagagccacgtgaataaaaatgaagttggactccttccacataaagtatgcagtataggccgagcgcagtggctcatacctgtaatcccaacactttgggaggctgcggcgggtggatcacttgagctcaggaatttgtgaccaggatgggcaacacagcaaaaccctacctctaaaaaaatcacaaaaaattagccaggcatggtggcatgcaccagtagtctcagctactcaagaggctgaggtgggaggatcacttgggcccaggaggtcaaggctgcagtgagctgtgttcattccactgcactccagcctgggtgacaaagtgagatcctgtccccaccagaaaaagaaaaaaagaaaatacacagtatagtaattaactcaaaaaggaccaaagactgaggtgtaagaactaaaattatgaaactcttaggagaaaacatacaagtatatcttcatggccttagatttggaaggtgtttcttagatatgtcaccaaaaacacaagcaacatgagaagaaatagatgaattggacttaaaatttaaaattcttatgcatcgaaggatattatcaagaaagtaaaaagaatgggaccaaatatttgcaaataatatatctaatgagcctagtatccccaaagaagattcgctactcaaccacaaagagacaaaaatcccaactttaaaatggacaaaggtcatgaatagacatttatccaaagaaggtatagaaacgaccaacaaacacacaaaaagatgctcaacattattgtcactatggcaatggaaagcaaaactctacaacgattaagatggctgtaattagtaaaacggaacataacacgtgtcggtgaggatgtggagaaattggaattctcatacactgtatttgggaatgtaaaaggattcagccgctgtggaaaagagtctgcaagttcctcaataggttaaacatagagttattgatatggtttatctatgtccctgtccaaactcatgttaaattgtaatccccaatgttggaggtggggcctggtgggaggtgattggatcgtggaggtggaattttcatagttcagcaccatctccttggtgctgttaagacagtgagtaagttctcatgagatctggttgtttaaaagtgtgtagcacctccttcctcactctctttctcatgctcccgccatgtgagactcctccctcgtgcttcactttatgccatgattggaaacttcctgaggcctccccggaagcagaagtcgccatgcttcccttacagcctgcagaactgtgagccaattaaacctattttcctcacaaattacctagtctcaggtatttctttatagcaatgcaagaacagactaatacagttatcatattgactagcaatttcactccttgggatatacccaaaggaattggaaacagatattcaaatgaaaatctgtacataaattttcatggcagcactactactcacatgagccaaaaagtacaaacaactaaaatgcccagtaactgacaaatggataaatggaatgtggtctttccatgcaatgggatatcactcagtccaaaaaaagaaatgaaataatgatgcatgctacaacaaggattatcctcgtaaacatggatttaccttgaaaacattacccttggtaaaagaagccagacatggaaactcatcaagcttagtaggccatttagagaaaacccacaggtaacattacactcaatgatgaaagactgaaattattccattcacattaaatatccagcatagataaatccatggaaataggtacacgttagtagtttccaggggctctgggaagcaggcaatagaaagtgactgtttccctttcagggtgataaaaatgttcagaaactagatggtggtgatgattacacagcactgtgaatgcaataaatgccactgaattttatactttttcttttttttgagacagagtttcactctgtcacccaggctagagtagaacggtgcgatctcagctcactgcaacctccgcctcctggattcaagcaattctcatgcctccatctcctgagtagctgagattacaggcacccaccactatgcccagctagttttttgtatttttagtagagatggggtttcaccatgttgcccaggctggtcttgaactcctgagctcaggcgatccgtctgccttggcctcccgaaatgctgggattacagacgtgagacaccgggcccagcctgaatgttatactttaaattagcaaatggaagaaattcttttctgattttcaaatattactgaaattttaaagaaacagcagagatgctcagggtgaagcaagtgcttactgtgtgaatccatttataggaagttgtaaaacatgtaaaactagttgatggtgacaaatgtcagaacactggttgcttctcagactgtatgtggaggcagagattaatatggaagggcatgaaggatgctgttttctctggtcaaagaatgacccttatcttgagagggtttcagttgtgtgagtacatgccagtctcgccataggacgtctctgggctcccatgggcatcttgcataaactcaggaactgggttcttctattctctgctgcctcccaccaccctactctcagaagataccttgattctggcttaagaggaaataaacacagtgtagtgatagagaccctttcctgactataaaactattcacctcattgcagctgctaccatccctccttcaacttggttgttccatcttaccttgaaaagtgacttatggaacaacttgtccaaacgtctccactttagagggacaccagtttcctgtgtaattatgttgattgcaatgaaatactcctaagagagggctgacattcctgcttccaatcagaaaatgaggtcattaggcaaacgtccagcagagagagtaattagaaaagatgaaaacatgcattccaatctattctgttcttattatgtttttttttttttttttgagatggagtcttactctgtcacccagttggagtgcagtggcatgatcttggtcacagcgatcttcacctcccaggttcaagcgatcctccttgcctcagcctcctgagtagctgggactacaggcacccaccatcacacctggctaatttttgtatttttagtagagatggggtttcaccatgttggccaggctggcctcgaactcctgacctcaggtgatccacttgccttggcccttcaaaatgctgggattacaggcatgagccactgcgcccagcctatgttcttctggctggactggaggacagtaaggaaacagggcagggctgatgctttccaaacacagtgggacatagtcctcaggtcagcagcgagcaggggatgggaacccacctcatctcactaaccctagctgccatcagtagaacaaaaagtcattaataaaatccaaatcctggaacagcttcaaggaaacaaatgtcaacattgaccaagtcaataaacatgtcagtgtcttctggccagagatcagcaggcaccaggaatagatatgtagttgggttattactcattgcagtgaggaaccacgaaaaccatgaggtgtttcagtaagagagaattataactggcttattataggatttggacttgtgttaggtgatttggggaaactttttaaaaagcagtgtttgcttctttggatgtcaggaagtcagcataattctaacactggatcttcatacatctaataaaaaaggagaaagaactagaccaaagctaccttagtcagtttgggctagaataagagatatcacagaccggctagcttaaaaaacaaacatctaactttgggaggccaaggtgggtggatcacaaggtcaggagatcgagaccatcctggctaacacggtgaaaccccgtctctattaaaaatataaaaaattagccgggcgtggtggcggactcctgtagtcccagctactcgggaggctgaggcaggagaatggtgtgaacccaggaggcggagcttgcagtgagccaagatcgtgccactgcactccagcctgggtgacagaacaagactctgtctcaaaaaacaaacaaacaaacaaaaaacaaacatctatttctcatagttctggaggctggaagaccaaaataaagatgtcagtacaactgggttcttagtgaggtccccgctcctgggtcacagatgactgccttctcactatatcctcacatgggagagagagagctctggtcccttcctcattcttacaagtgccataatcccagcatgggcattccacttccatgagctcacctaaatcccattatctcctaaaggccccacctccaaatatcatcacatcacattaagaattaggacatcaatacatgaattttagggtgacaccaacatttagtctataggaaaggctgtggctgtaattggtaaataatcatcagtctttcctgttaccctagatgggaaatatgtagccattttccaatttggacaacattcttgtttgtgtctgtgttaaggcatgactgtgctgtggtcttattcttgtcttgatccattatgctcaaagaatgtccttgtctggtgttgatgtcctgtgcagtgattgacaacaggacaggagaattgcttgaacacggagacagaagctgcagtgagctgagatggtgccatggcactccagcctgggtgacagagcgagacttcatatatataaatcacgccactgcactccagcctggcaacagagcaaaactccatctcaacagccacaacaacaacaaaagtctataaaaagacttacacctgagtaccattagtgaaaaatggggaaatctcaaatgcctatcaatagatgaataaatataggactatagtatattcatacaatgggatactactgagcaatatcacactgtgaaaactataggcacaaacaacttggttcagtttcaaaaaatatgctgagtgacagaatacagacacagatgagtacattccttcctaggaaattttgaaataggcaaaagcgacacactatgagagagaggatctcagtggttgcctggcacaagaagtgggaatgatgaactgcaaagaggttaggcaaagcccttggtgtagtggaaatgttgtatatcttgattgtgccagtcacaacagggctgtatgcacctgtcaaaattcatgaaaatgaacacttcaagtgggtgcacatcacctcatgtaaattatacctagttaagttcattaaagaaacacagtaagacagattttcttatgtatccttctactccatgaatgtggtatgatattttactgttaaaagtaaatatactgaatattatattatgtgcctatactatcttttaaaataacttacagcaagatattgttttatctattgaggactcacttccttatatttaaaaagaggatggaaatacctctctatggtaggtaggatgaatgaacatttttatagatactactgtgtatagagattttacctgtatatggttgcaaatactgatatgtctcaggcattgaggatctcccaggtgtgtaccacagagagtaaaataaaaaaccatatgagctgaagctaaattttaattttgtctgtacattcaactcatattgtctggaaacattatgtctttgggcctcatttaattatcagaaatgtatttttacatgaaagaaaatgctaatctctatggtaagccccataaaaaaattgctgctgtccccactgcagggaatggcaacactaatggaaaagaaatttcttctggacttgttcacagaagctttcgttttacatgaaaatactacatgtttcttattttagagatgtcgctgaaacattgcaaatcagtgtactaactgccaggggaaaaaatccatagtcatacttcttaaaaatacctcatatgataccatgacatatggcaaagtcaccagcatccacagctgtgaagccaaacagtatttgtgtgtggtgaacatgaggctatggatggggagtatctaaaggggagggaccaggtcagtggcatctcttcttgtctccagcctcattggcacatagatgctcggtatagcttaggtgaatgaatgaatgaatgaattgaatgaatgaatgactgtcaccttcaccacatctaggacccttcttcatttcttctgccccagacacttacatgaaccctacagaaacctatatcctgcaggacgaaccaccccacaggtcaagaagaggccgtgactcgggccaggcctggagtgaccagctgcctggtgtaaacagttgtgcacagaaaagcacctcagagtggaaggactttagacatggggttcgcatgtctcagatggccccgaaggtactgatccaggctctggtgctcctggaaggcaagactcagattctgctccatctcctcccatctctgggcgagtctctggcatctctggcccatgagggtcaatctgtgtggaggggacaagctctgagcacgtgtgggtctgaggttcctcttccatgcagggctgaggtttcctgctcctccccagcttcctgtccggccctgtagtccttcccctccactcccttcctcttctctgctcacacaggaagcccgggaagcctctgcctcagacatgccactgctgctactgctgcccctgctgtgggcaggtgaatggctgcggggagaggggttgtcgggctgggccgagctgaccctcgtttccccacaggggccctggctatggatccaaaaatccggctgcaagtgcaggagtcagtgacggtacaggagggtttgtgcgtcctcgtgccctgcactttctcccatcccataccctactacaacaggaatttctcagttcatggttactggttccgggaaggagccattgtatccagggactctccagtggccacaaacaagctagatcaagaagtacaggaggagactcagggctgattccgcctccttggggatcccagtaagaacaactgctccctgagcatcgtagacgccaggaggagggataatcgttcatacttctttcggatggagagaggaagtaccaaacacagttacaaatctccccagctctctgtgcatgtgacaggtgaggcacaggcttcagaagcagccacaagggaaggtcaaagggacctcaggacagggcttgggatgggacccatgtcctggaagggggttgggaatgaagcctgtcagactcaggggaggacccggaccagaacctgagcttccctcagggctgtacctcagtcaccccttcctgatcctgcatccccgtttcctcaccagccctgacccacaggcccagcatcttcatcccgaggaccctggaatctggccaccccaggaacctgacctgctctgtgccctcggcctgtgagcaggggacgccccccatcttctcctggatgtcagctgcccccatctccctgggccccaggaccctccactcctcagtgctcacgatcatcccatggccccaggaccacggcaccaacctcacctgtcgagtgacgttccccggagctggtgtgaccacggagagaaccatccaactcagtgtctcctgtgagtgctgggccaggacgcctgggtccctgagggtgtgatggggggaggaccaggagagaggaggaccaggactggggccactggtggctgtgtcctagaggcctggctgagtagaagacctaggccacaagccctgtctctctacatttctgtggcttctggggtagggaaggagtgccgcccttatctcaccctcaccccaactgaatgggaaatcctctcttattgtcctagatgctctagggaacctaaagattggtgtctccctaggagaaggcacaggtaggatagaaactccctccttgggaagaggagaccttcagctcagggcaggggtgggcctctcctcatcctgacctcacctcatcctggtgatctgacacccttttgtgggtgaaccaaggccccattcccatcctcagcccccatggccatctgaacacctgtccccatcgccccctcactcccctcagaccccacacacaaccccctcaaccccacaacaagggcagggtgatattcacacacagacccagcctttcagcttccctacattcatcacctgaacacgcctcctgcctcctctttctatttccccctgtagttcagacctaagtgcttctggacaggtgatacagtctcatgggaagaacttaacaatgcacagcggagtctgtccttagatgcccgtcctcctccccagaattgaccagtgtccaccctggctgctctgagccttggtgtgttcacctgaaggatctcagaggtcatttggcagcaacagcatagactgttcttatcctcctgtaggacgcctgtggtattccattgcatgaatagaaattctgtataaatcttctgctcctggaaaagcatggcattgattttgttctaccaacagacacactgcaatgaataatcttgtatctacttcagcaagtgtatgcctatgtatgtgggacctgttcctaaacgcaaaatagctagcttagacgttctttttaatcttgtgaaatatggcaaaatttttctcaatcaagagtgggcaagctgacattcccaaaagtaaggggtcaaggtgcttgttttcgtcaacccagtgtggaaggagaccttttggtttttgccaatgtcaggtgacaattgttgtgtccgtgtagtttttattagataaaaattcacataacattaaattcaccattttaatcattttaaattgtatgataaagtggcttttagaatgctcacaatgttctttaaccatcccactatctaatttcagaacattttaatcactcaaaaaaaacctctaactttttgaagaaataccagactgttgtccacagtgtcagcaccaatgtatgttgcaccaccaatgggtttgggttgcaatttctccatattcttgcaaaaattctcatttttcttttcttttgttttgttttttgtttgtttgtttttgttttgttttttgttttttgagattgaagtcttgctctgtcgtccaggctggagcacggtgacacaatctcagtccactgcaacctccacctccccagtccaagcaattctcgtgcctcagcctcgcaagtagctgagtttacaggcacccaccacaatgcctggctattttttttttttcagtagagatagggtttccccatgttggctaggctgatatcgaactcctgacctcaagtaatctgcctgcctcggcctcccaaattgctgggattacaggcgtgaaccactgcgcccagcctcatttttctttttctttttttttttttccttttttttttttgatatagggtctcgctctgtcgcccaggcttgactgcagtggtgcaatctcacctcactgcaacctccacctcccagattcaagcaattctcctgcctcagcctcctgagtagctggcattacaggcatgtaccaccacgcctggataattttcgtatttttagtagaaacagggtttcaccatgttgtccagcctggtctcaaactcccaacctcaggtgatccacctgcctcggcctcccaaagtgctgggattacaggcatgagccaccatgcctggcctcatttttcttttcctttttttttttttgtttcttttctttcttttttttttttttttagatggagtctcactctgtcacccaggctggagtgcaatggcatgatctcagcttactgcaacctctgcctccaggttcaagcgattctcctgcctcagcctcctgagtagctgggattacaggcacatgccagcatgcccagctattttttgtatttttagtagagacagggtttcaccatgttggtcaggctggtctcgaatttctgacctcgtgatctgcccaccttggcctcccaaagtgctgggattacaggcgtgagccactgtgccaggcctcatttttcttatttaaaagatgtatagcctaatagtgagtgtaaggtacatcattgtagatttaatatgcattaacataatgatgaatgatgttgagcgtattttcatggtcttattgattatttatatcttttggtaaaagttttatttaagtcctttgtccattttttcattggataatttcggttgtttgtaatttgagttgtaagtgctctttatatatgttggatactagacccttaccaaatccatgatttgctaatatatgctcccattttgtgagctatcatttcacttttctgatagtgtcaatcactaaacagaattttaaattttgataaagtccaacttacatatcatttctctacccaaccattggacagtcagggcatggtttatggtaagccctgggctcatgtgatctcacagccagggatgcctgaagggtctggagaaccttccttttcttatgttcaatatggacacagattgtggcttgtcaagtgaatcaacctcatcccacttttttgtagggaaatcaaggcctgtgacaaaggtggttcttgtggccattggggaggcagctgtgaagatcctgcttctctgcctctgcctcaccttcctcaggtgagcactgccccaggggaagtgtgtggagggcaggagacatgatgctgaatcccagaatctcaatcatggagatactcaaataccttaagagcacctaggaccaggcaaggagctcaactggtggtgagaattccacatggttcatttgtagtcaggcctgtgtctgtcccaacccgaggccaaatgccagggtggagaggtttctgttctcataaagaagatcttgagggctaggcctgctctgtctaccacattttctatcagcccctttgcagcgcacagggaggtgagtctgctgccctctgcaccccaatctggccacacttatatgccccgatctcttcactcagtgtgaggtcctgcaggaggaaggtggcaaaggcagcagcagctgtggaggctgaaaacactgccatgggctaatctctcaggtgagtgttgtggacgtctcaccctccaatatcgtgctggatgacttctttctgtggcccccaggatagctgcactcagcatggccaaagttgaacctcccatgtccatccccaaacccacttctctttagccccatctctaaagtcagaaccagcttgtgggtctccaccttgacctccccaccttctccagatctcataaatcacccactcttgtccctctttctcccaaccagggctcatttggtgcccttttctccgtcctgaccttggtcatgcctgggccctcacctcctccctggtcactgaaccatcctcaccttttgcctccctgtctccccagcacaggcctccagactctgcttctagctgcctcctcgtccagtgcctccacagtctgaacagccttgtctccttgtttcctctccattgctggagaacaccaccgtctggactgaaggccttgcacgttctatcctccactggactctcctgatccctcctttctctgtgtcacccaaagtctccccacacccactgggccaagccctctatgactctgagactttgcatgtgtagttccgtttcctgaaatgcccttccctcccattcctgccaagtccaggtcctgattgtccttcaggctcagtcttaaatgtcacccgagtgtgtgtgtgtgtgtgtgtgtgtgtgtgtgtgtgtgtgtgtgtttcttgtatgatattgagggaaggagtgacatttattcattaatctatagattctttggtaactatactgaacacctactatgtgccagcattgttgtaggtgccaggggttcactggtagacatagcatcagaaatctcagtattaagaagatgttctgggctgggcatcgtggctcacacctgtaatcccagcactttgggaggctgaggtagtggatcacctgagatcaggagttcgagaccggcctgaccaacaaggtgaaaccccatctctactaaaaatcaaaaattaggtgggcatggtggcatgtgcctgtagtcccagctactcgggaagctgagacaggagaattgcttgaacctgggaggcagaggttgcagtgcgagactctgtctcagaaaaaaaaaaaaagatattctgaagacaagatggacataaaaaaaggaataagcaatagaaagtatttaactatataggatggcaatatatgtttagagaaaaatcatgcagggaaagaagcataagatatactggggaaccatctctgtacctgatgatgggaagagattatatttgggctaacacatgaaggtggtgaggaagcaggctctgtgtgtatataagcaaaagcatcccaggaagaaggaaaagggggaagagcaaatgcattgctcagaggcagcagtaggcctgggtgttgcaaacacacccagtaacccatgtctaagagcagagggaggcagaggagtcaagcggtggaaaggacactgcagaccacctggtgccctgcaggccacacaggaacctagagcctttgtggagaggagagactcaactggactggatcccttggctccctggcgagagcaggcctgagcgggtcaaggcacctacagacagactgggagagcgctgctggatcctccaggaagaggaatgaggtcttgaaccagacaggcagggttggagtgaggatgtgtttttggatgtatttggaaggtcaagctcacaggattttctaatggatatagtcattgaggggaagggaagagcatggataaagccagaatgttcctctgaacatctcactctttcgaaactccaatgtcttttttgtttttgttttgttgttgttgttgttttgttttttttttttcttgagacggagtcactctgttgcccgggcttgagtgcgatggtgtgatcttggctcactgcaacctctgcttcccaggttcaagctattctcctgcctcagcctcccgagcagctaggattacaggcgcttgccaccacacccagctaatttttgttgttgttgtatttttagtggagacagggtttcaccatgttggtcaggctggtcttgaactcttgacctcaagtcatccaccaatcttggcctcccaaagtgctgagattacaggcatgagctaccactcctggcctccaatgtctattattccacactctatgcccatgtatacacattatttaactacacttatacatgagaacatatgatatttgactttccacttctgaattatttcagttaagataaccttcagttccaaccatgttgcttgaaaagacatgatttcattctttttcatggctgggtagtattccattgtataacccccattttctttatccaatcatccatggataagcattaggttgattccatatctttgctgttgtgaatagtgctgctacaaacatacgagtgcaggtatgtttttgatataataatttcttttcctttacccagtagtgggatcattggatcaaatggtagttctatttttggttatttgagaaatctctctgttttccgtagaggctgtaataatttaccttcccatgaacactgtataagcatttcctgttctccacatcctcaccaacatctgttatttcttgactttttaaaaatagccattctatctggtggaagatgatttctcactgcggttttaatttgcatttatctgatgattagtgatgttgaacctgtttcacatgcttcttggccacttgtatgtcttcttttgaaaactgcctattcatgtcttttgcccactatttaatgggattttttgttttttattattaagctgcttcagtttcttgtacattctggatattagtctcttatcagattcacagtttgcaaatattttcttccattctgtaggttgtctgttcactctgttgattattttttatgctatgcagaagctttttagtttaattacatcctgtttatctattttttgttttgttggatttgctttgagatcttagttgtgaattctttgcctacgccaatgtccagaaaagattttcctaggttttcttcagtatttctatagtttcaggtcttacatctaagtttttaacccatcttgagttaatgtttgtgtatggtgagagataggggtccattgcattattctgcacatggctatccaattctcccagcaccgtttaattaataaggtgtcctgtccccagtgtatgtttttgtcgactttgtcaaaagtcaggtagctgtaagtatatggctttatttctgggttctctattctgtttcattaatctgtgtgtctatttttataccagtaccatgcttttttgtttactatagccttgtggcataatttgaagtcaggtaatgtgatgtctctagctttgttctttttgcttaggactgctttggtaatttgggttctttttgtttctatatgaattttagaattttttttcaaattatgtgaaatatgacattggtattttgataggaattgcattgaatctgtagattgctttgggcagtacggtcattttcaaggtattgattcttctgatccatgagcacgggatgctccatttttccattcatctgtgtcatctacaacttatttcatcagtattttgtggtttgccttgtactgatctttcacctccttggttaaatatattcctaggtatttttctgttgcaattgaaaatgagattgacttcttgatttttcttctgttagattactgttggtgtatagaagtgctactgatttttgtacattgattttgtatcctgaaattttactgaattaatttattaaatctaggagtcttttgaaggagtccttagagttttctagatttaagatcctatcatcagcaaacagagataatttgacttcctcttttccaatgtgggcgccttttgtttctttctcttgcctgattaattgctctagataggactttcagtatcaggttgaatagcaatgaagagagtgatcatccttgtcttgttccagttcttagggggaatgctttcagtttttaccctttcagtatgatgttggctgtgggtttgtcatagatggctcttattattttgagatatgttcctttaatgtctagtttgttgagggtttttaccatgaagagatgttggattttatcaaaagctttttctttgtctagtgggatgattatatggtttttgcttttaattctgtcaatgtgatgaatcacatttattgatttgcatgtacggaaacatccttgcatccctggaataaagcctacttgatcgtgacgaattatctttttgatgtgctgttgaatttggtttgctagtattttgttgaggatttttgcgtctatgttcatcagggatattggactgtaatttacttttctcattgtgtccttgctaggttttgatatcacggtcatactggcttcatagaatgagtcagagaggattccctcctcctgaatattttgggagagttattctttgtacatttggtagaatttgactgtgaaaccatctggtcctggacttctatttgttgagagatttttttctattgctggttcaatctcactacttgttattggtctgttcagcatttctatttcttcctgattcaatcttggcagaatcttatggttctaggaatttatgcatttcctccaggaaaagttcctctccatgttttgaaacaaaagatattattctctcacagttctggaggctagaaatttgaaatcagtaaggccaggcagaaatgaaggtgttggttggactacaacactccagagacttgagaggatccatacctcgcttcttccacattattgtggctggtgtcattccttgaattttggctggactgctcctacttctgtctctggggccacatggcctcgcctccttctgtgtatatcacatctccctctgcttttctcttatcaggactcttgtaggactcttgtgattagatgtaagggttgactgcataatccaggatttccactggtcaagatcattaatttaattaaagttgtaagaatacctataaagtaacaatacaggctcaagaaactaagacccagttttctttgggggtcattattcagattactgagccgctgtgtgatcttctgccccctaggaggcccccatctgccctccagaccttgccttctctttctattactttctctgttctttccgtcctgacacactagtgggccaactcatgtaacgcgtatttatgggaatggggtctattataccataaaagacactgataagacagccaaaagataagttacagggtgataacacctgaatataggtatctgatgaatgacttgtatccagaatatatcaaggactctcaaaacaaaaacataagtaaaccacaacagcaacaacaacaacaaaaggcccaattttgtgtaaatgaaaaagcagccactcaacaataacaaaaaataaacaacacttaaaaatggacagagggtgtgaatcacatttctcaaaaaaatatagtactcaaggccctcaccagaagcaaatgccagcaccacatttcttgcacagcctgcagaactgtgagccaaaatatatctgttttcttcataaattactcagtctcagatattcctctatagcaagccaagaatgaactaacacaatattttaaaaaggtagccaaaggttttatcagccacctcaccagaaaagaaaaacagatggcaaacaggctcatgaaaacatactaaagatcatttgtccttaggtaattataaatcaggagaataagcattcttaggtagcattacatacctgagaacataactagaaaacaaaacaaaaataaaaagaaatgtttaaatattctgataatatcaaatgttaacaaggatgtgaaacaatcagaattcacacataactcctggtgggaatacaaaatggcacatcaactttggagaacagtttgacaatttcttataaatttaaactgaacacttaccataggaccaggcacctgactcctaagtatttacccaagagcaataaaaacttacagttacacacagaaacctgcatgccaatatttataacaacattatttcatagtcacccaaacctgaaaacaatctgaatgctcctcaaatggtaaatgcatacaaaatggggggtccataaaaacagtgagttacgagtcagcaattaaagggaacaaactatagattcatacactcaaccacatgattgaacctcagaggcactgcaccaagtaaatgaagccagactttggaggcaacattttgtatgattccatttatacgacattctgtgaaaaggcaatacagtagggatggaaaacatatcagcattttttcatggactaagtgtggagggagggttgactacccagagacaggaggaaggaacgtttggttaatgacactcttcagtgtcttcacagtggttgtgggtatataattatatacaactctcaaaccatatcaaaattgcatatgataaagagttaattcaactgtatctaactttaaataaattaaaaaatttaaaacactggatgccactatgctctcactagaattgttcaaatataaagcaggacagtatcatacgtcgacaagggtgtggagctactggaattctggcacatggctaggaggagtggtaaaaagtcaaaaccattttggacaacagtttggcaattcctactaaggttaaacttacaagtagtcattagtctgactatttatcttcctgtgtataccaattagtataaaaccatgtatgtaaaaagacttgtacctgaatacctgtagggagaaaactggaaaatccttgtctatcaataggtgagaaataaaacattatagtatacacataaatggaatactacttaacaatatcacattttgaaatacagacacaaacaacgtggttcagtttcaaaaaatattatgctgggtcataggatacagacacaaattaacacatctctaggagattttcaaatagactaactcacaatgaaagaggacatatcagtggttgcccagcatagaaggtgggaagaaaagcccttggcatactagaaatgctgtatatctgcagtgtggtgagtatacaggctgtacatactcgtcaaatctcatgcaaatgtgaacttcaagtaggtgtgctttatttcatgtaaattatacctaattaaattcattaaagaaacacagtaagactcacatattcatatttgatcttctggtccatgaacatagtatgactttattgttaaaactaaatgtggctgggcacagtgcctcatgcccatagtcaaagcactttggaggtcgaggtgggaggattgcttgaacccaggagttcaagatcagcctgggggaacatagcaagaccccatctctcctaaacataaaaacaaaaagttactccggcctggtagtatgagcctgtgatcccagctactagagaggatgacgtgggagagtcacttgagtctgggaggtcaaggctgcagtgaactgtggtcaggccggtgcactccagcctgggcaacaaagcaagaccctgtcttaaaaaaaaaagcactaaatgtattgaattttctattacgtgccacatgctaaatatttaaataacttacaacagatattatttactggagacttaatttgttgtatatcaaatgaggatgcagctacctctctattagtaaggatgaatgaagagttatctagatactattgtgtgtagagatttgacaaaggtatggtggcaagtactaatatgtcccagggatcaacggtttgctggatgcatactacacagagtgatatggaaaaccatgtagctggacctaaagtttaattttctctgtacactccactcatgttgtctggaaatattatgtctttgggccatatttaactgtgagaagcagatttttacatgaaagaaaatgttgatccatatgatgagcctctaaaaaaacttgcttctgcccacactgaaccaaatggcagcatgaatggaaaagaagttttttctgcactggttcatagaacatgtgttctcccttttgtttcacaggaagatgctgcatggttcttgttttggagatgtcattgacactgtgcaaatcagtgtactaggtgccaggggaaaattctatagtcatatttcttttaaaatttccaatatgctaccatgatacatggcaaattcccaacttttcacagctctaaagccagacagcatgtgtgtgtgtggtgaggacatgaggctatggatggggagtatcttaagggcaggaatcaggtcagtggcatctcttctcaagccccacctatacacaaaggctcactgtaagaattaaagaaagaggaaagaaacacgaatggtggctcaccagtcaagacagattttagagaaaacaaacctgagaggagtttctggccgagttaagtcagaggcacactctcttacagactaagagtttttaaggatttagggtgggagagtttatcagagacttggactgcttctgagtctctttgttgtgcttatctgggagagagaggtgtgtgtctgtacccatacatctttctgcagctacaggcatacccactgagtctgcttttagcttccctatcttagtgcacctgaagggaaaggaatttgcttattaaggcccactgttttactagggccattgtatgagggtgaagtttggcagtaactcaagagactctccccctacctccctctgtgcccgagctgtcttatctgtgtttcactgtctgctctttctggttgcttgtagttagcagagaagtgatttccttgaaatgcatgaggctagaaaggaaattggaacttaaagaggcagtgtttctccgagatgacggtgctcctgctctgtcactcactatatctttagtgaatgaatgaataaatgaatggctgccaccttcactttacctaggactcttctttgtttctctgccccagacactcacacggaccctatagaatcctatatcctgctggactaaacaccccatggatctaggtgaggctgcgactcgggccaggccagcagtgatcagccctggtgtaaacagttgtgcacagaaaagcacctcagagtggaaggactttagacatggggttcgcatgtctcagatggccctgaaggtactgatccaggctctggtgctcctggaaggcaagactcagattctgctccatctcctcccatctctgggcgggtctctggcatctctggcccatgagggtcaatctgtgtggaggggacaagctctgagcatgtgtgggtctgaggttcctcttccatgcagggctgaggtctcctgctcctccccagcttcctgtccggccctgtagtccttcccctccactcccttcctcttttctgctcacacaggaagccctggaagctgcttcctcagacatgccgctgctgctactgctgcccctgctgtgggcaggtgagtggctgtggggagaggggttgtcgggctgggccgagctgaccctcgtttccccacaggggccctggctatggatccaaatttctggctgcaagtgcaggagtcagtgacggtacaggagggtttgtgcgtcctcgtgccctgcactttcttccatcccataccctactacgacaagaactccccagttcatggttactggttccgggaaggagccattatatccagggactctccagtggccacaaacaagctagatcaagaagtacaggaggagactcagggcagattccgcctccttggggatcccagtaggaacaactgctccctgagcatcgtagacgccaggaggagggataatggttcatacttctttcggatggagagaggaagtaccaaatacagttacaaatctccccagctctctgtgcatgtgacaggtgaggcacaggcttcagaagtggccgcaagggaagttcatgggtactgcagggcagggctgggatgggaccctggtactgggaggggtttaggggtaaagcctgtcgtgcttagcgggggagcttgaccagaggttgatcttctctcaggccctcacctggaccctccctcctgattctgcatcccctctttctcctcactagacttgacccacaggcccaaaatcctcatccctggcactctagaacccggccactccaaaaacctgacctgctctgtgtcctgggcctgtgagcagggaacacccccgatcttctcctggttgtcagctgcccccacctccctgggccccaggactactcactcctcggtgctcataatcaccccacggccccaggaccacggcaccaacctgacctgtcaggtgaagttcgctggagctggtgtgactacggagagaaccatccagctcaacgtcacctgtaagtgctgggccaggatgctggggtccctgagggtgtaggggagacaggatgggctggtgctggggacatttagtgtcctggaggcctggctgagttcgggagccagaaggacatgagccctgtcccttctgcatttctgtggtttctggcaggagtaaggggaaatgcctacccttatctcatctctacccccaactgaaggaaatcctctcttcctctcctagatgttccacagaacccaacaactggtatctttccaggagatggctcaggtaggaaggagcctccccgcctggggctgttactgacattgagtctgtgtcaggtttggtcagatctggactttcagagtcaaatgttcagaggcaaggcctgcagttagacacgggtagacatcaggcaccttggaaaaggatatttggggatgactagcaacttcccccttgcccatccaaataatgctctttgtctccctcctgtctctgaatgtcttggggtattttatttttaattgatatgtaataatagtacatatttatggatggcatagtgatgtttccatactaataatgtatagtaatcagatcagggtaatagcatatccatcatcttgaacatttattatttcattgttgttgggaacattcaatatcccctttctagctatttgaagctatctattattgttaagcatagtcatcctacagtggtatagaacaccagaacttattcttcctttccaggtgtaatctagtatcctttaacaaatctctctccttatcattgttcccctaaccttcccagcccttattattctctgttctactttttacttctatgaaatcaacttcttgtagcttccacttatgagtgagaacatgtggtattcaactttctgttcctagcttatttcatttaacataatgtcctctagttcaatctatgttatagtgaataacaagatttcattattttttatggctgaatgataatccattgtgtatatacgccacatttcctttatttattcatctgttgttggacacttaggtttatttcatatcttcctattgtggataatgctgcaataaacattgaggtgcagacgtttcttcaatatactgatttcctttcctttctataaatgcccagtagtggggttgctggatcatatggtagttctatttgtagttttttgagaaacttccatactcttctccatagtggttatactagtttacattctggtcaaaagtatataagagttccctcttctctacatcctcaccatcatttgttaattttcatcttttttttatcatagtcctcccaactggggtgatgttacctcattgtggttttgatttgcatttccctggtgattggtgacgttgagcatttttcatatacacttgttggccatctgtatatcttttcttgagaaatgtctactcagataatttgcccatttttaaatgagattgggtttctttgccattgagatgtatgagttcctcgtatgttctggatatgaatcacttgtcagatgaatagctgacaaatattttctcctattctgtaggttgccttttcactctgttggttgtttcctttctgcatagaagctttttagcttgatatcatctcatttatttacttttgcttttgttgcttgtgctagtgaggtcttactcataaaatatttttccagaccaatgtcctaaagcatttcccctatgtttttttctagtattttttaaattttgtgtcttatattcaggtctttgatccattttgaattgatttttgtataggacgagaggtgtgagtctaatgtcattcttctgcatatggcaccagttttcccagcatcatttattaaagaaactgctctttcctcaatgagtgttcttcatgcatttgtcaaaattcagttggctgtagatcgtggattaatttcggtgttctctattatgtattattggtgtatgtatctgcttttatgccaatatcatgctgttttggttactacagctttgtagttttgaaatctttaaatttttgaaattttgaaattttctagttttgaaattttgaaatcttgtagtgtgatacctccagctttgttcttttttgcttgggattgctttgaccattcaggctatttttagttccatatgaattttaagattgtttcctctaattctgtgaagaattacattgatattttgatagagccaggtttgaatctgtagatttctttgggtagtataatcattttagcaatattaattcatctgatgagtaaggaatgtctttccatttgtttgtatcctcttcagtttatttcctcagtgttttgtagtttttcttattaaggcttgtcacctccttggttaaatttattcctaggtatacttcattctcttatagctattgtaaatgtgattgccttcctgatttattttcagctaattcattgtgtgtagaaatgctactgatttttgtatattgattttgcatcctgcaaatttactaaattcatttatcagttctgagagttttattgttagagtctttaggtttttgttttgttttgttttgttttgttttgtttttgagatggaatttcaccatgttggccaagctggtcttgatctcctggcctcaagcaatctgcccactttggcctcctaaagtgctggaattacaggcatgagccaccacgcctggccaagtctttaggtttttgtatgttatttgcagagacaatttgacttccgcctttccagtttggatggtttttatttctttctcttgcctaattgctctggctaggactttcagtactatgtaaaataagagtcataacagtggacatccagttcctagaggaaaagatttcagcttttctccattcagtatgatgttagccatgggtttgtcatatatggccttttttgtgttgaggtactttccttctatacctaatttattgagagtttctatcatgaaacaatattgaattttaacacatgctttttattctgcaactatttaggtgatcatacggtttatgtccttcattctgttgacatatgtataacatttattgatttgcatatgttgaatcattcttgcctttctgggattaatcccactttatcatggtatgttatctttttgatgtattgttggatttgatttgctactattttgttgaatatttttgcatctatgttcatcagggatattggcctctagttttctttttttattgtctcctttctgattttggtgtcatggttatgctggccttgtagaatgagttaggaagagttgcctccacttcaattttttggaatagtttgagaagagttggcataatttttttttctttaaaggttcagtaaagttcagcactgaagccatccagccctggaattttctttgttggggggccttttattattcattcaatctcattacttgttgtttgtctgctgaagttttctataccttcttgattcaatctcggtagattatatgtgtccaggaacttatccatttcttctagactttcaaatttgttggcatattgttcatagtagtgtctaagatcctgtgtatttctgtggtaaccattgtgacatcttcttttttatttatgattttattaatttttatgtcttctgtctctttcttagtttagctaatgattgtcaattttatttatttttccaaaaagcgaacttgttcattgatttttttttaatttcatttatttctgctctgatctttatgatttctttcattgtgctgattttggatttggtttgttcttgctttctagtttcttgaaatgcacagttaaatggtttacttgaaatttgtctaattgtttgatgtaggcatttatttctctcaagttgtctcttaaaactgtttttgctgtgtcccataggttttggtatattttatttctatttttatttattttgagaaatttttaaatatcattcttaatttcttccttcactattggtcatttagaatcattttgtttcatttctgtgtatttgtatagtttgcatgtttcccttggtattgatttttagttttattcaattgtagtcaaataagatacttgatacattttggtttttaaaaatttttggcacttgttttgtgttctaacatatggtcgatccttgggaatgttgcacatgctgatgaaaccatgtgtattctgcagctgtcggttgaaatgttctgtaaatatcttaggttcatttggtatatggtgcagtttaaatccaacgtttatttgttaatcttgtctagatgatttgttcaatgctgagagtggggcgttgaagtcctcaactattattgtattggagtctatctctccctttatatctaataatatttgctttacatatctgggtgctctggtgttgtgtgcatatgtatttacagttgttatattatagtgctgaactgacccctttataataatataatgtccttctttgtctctttacagcttttgacttgtagtccgttttgtctgagataagtatagctattcctgcttcctttcatttccacttgggtagaatatctttttccatctcttccttttcagtctatgtgtgtcttctaggtgagataagtttcttgtaagcagtatatagctgtgttggtagaagggctgaggcagggcttgcttgtctgacataatgtaaaagagtcttggaacatgtcctgggtccagggtctcaaacccctcgtggcctatggaacaccaagctctgtgcctaagggtggaaggctgccctgccacactgcaatctaagcccagggcataaaacccctcgtggcttggaaagaatccagggctctgggcataaaacccctcatagcctctggaatgtgtccagacttgctggccccttgctccttgctctcccaggatcataaattgattgtatcttgagtgaaaagaacttgttctccattatttcaagtagcagagcatatgctaaaccgtcacagctatgcttgatgcaccgctacctttctaccccaaagtcctcacgttctcacttgtctatccccacttctgcacgtcctcaccacctgcttctttgtttgattaccaataaatagtgtgggctcccagagctcggggccttcacagcctccatactagcgtcggccccctggactcactttatgtactattaacttgtcttgtctcattcctttgactccgctggacttcgtggcccccacggcctagtgttggatctgatcaccccaacaagctgagtctagattttcttttcattcattcaggcagtccatatattttaaatgggacaatttaatccatttacatacacattattattaataggttattttcatttcattgattgttttctgattgttttatatattcctggttccttacttcccctcttattgtttctttttgtggttggctgatgttttttttttttttgtagtgataagatttgattcctttctctttcttctttgtgtatgggctgtcagtgagttttaagttcacgtgtttttgccttttcacttccagatgtaagactcccttgagcatttcttttctttttcttctcttatttatttttattattttttttttgagaaagtgtctcactctgtcgcccaggcaggagtgcagtggcatgatcacggctcactatagtctcgacctcctgggcttaagcaatcttcctgccttaacctcccaagtagctgggactacaggcatgtgccaccacgcccagctaatttttgtgtttcttgtagaggtagggtgttgccatttgcctaagctggtctcaaattaaagagctcaagtggtccacctgcctgccttcacctcccaatgtgctgggattataggcatgagccacactgtgcctggccccttgagcatttcttgtaaggccagtctaagagtgattagaattcccttagtttttgcttatctatgaaatattttatttctccttcttttctgaaagatagcttttctgggtatagtatttttgactgttaagttttttatctttcagtactttgagtatgtcatcccattctatcctggcctatataatgttactgctgagaaactcactgttagtctaataaggataatcctatatgtgactagatacttttaccttgctgtttttacaattctttacttgacttttgacaatttggcataatgagctttggagaggacttgcttgggttgaatattttgagagtactttgagcttcctggacctggatgtccttctagttcccaaggcttgggaagttttcacctattactggattaaatatgttttctacaccttttccattctcttctcctcctggaaataccataatgtgaatatttgcttgattgtgtcccatgagtcctgtaggtttccttcgttctattttattctcttatttttacctgcctgtgttatttcagaagatctgtcttcaagttcagaaattattttttcttcttgacctagcctgttgttgaagctctcgattgcggttttttatttcatttattgagttctcagctgtaggagttctgctttgttcttttatataatatctatctctctgttaaatttctctttcaagtcatgaattaaaacaatgggacacaggtgcccaactacttggctgacctgggggcatatctgctggaggtgccaacatggctgttttgcagggctgagatgaagctgaatgactcttggctggcctaggtgtgtttttgccaggagtagcactcagagctttatctagggtttgggatgtgagtgtaagactgctcagctggcctagggggtgtaccagccagtggtagcccatggggctgtttctcaggcctggaatgcaagcacattctgcctggggtcatgtctaaaagggttggctcacaaggctgtttctcaggccctaattgtgggagagtggcctttgggcaggccagagtcatgtccacagaaggcgtctgggcaccgtaaggctgtttctcagagcctgtgtgtgagcacataaccactaccccagcctggggatgtatcaactctttgttggctcagaggtctctcccattcaggtgagcatgcacagtagtttggccaactcaattgtgtgttcgccctgagtgggactataagacctttcctccagctggaagtacgggcagcaggggttggtttctctgctgttcagggccagagtcccagccaatcctgggcccaggctccatgcagctctaattgtggtattcagccactactgcaggtttagtggaatgaagatgcacaatgataaagaggtgcatgccactggcccccagaggagggtgcactccagagatggctgtggtctcaagatggttctgtgttgtagcagcttgcccgcaggggctggttagggagttgggagtgcacaccaaatgctccatgcagctgtgtgaattcctggcagctcttccaactgtgctcagagcttgtgaggactgtaagattaacctgtagtaaggaatgtaggtatctgcagtggcactggaggttggttggattcctctgcttatcatttccctacaaggggaaatccttcctgtctctgggacaaaccaatctgggctggggagatggagctgcaaagcccgggtgcctccatgctgccctcctgggtttccaattaccacaggtaactctccactcccttgctgcactacactactctcccttcgacactccactcaaatctttgctgtggtttattcattgccttggtcctttcttgtctggtgacacgggggaggatgagctccaggcacctccggtgagccattttgctccaatgggggcatttttttttaataggttttatttttcagagtagtttttgtttcacagcaaaattgagtggaatcttctagtcgctgatcatcttgggagcatttataaatgaaccttatttttcatgaagaaattgagcagaagatactaagacttcccgtatgccctctacccttacacatagtttccccggccatcagcatcccccatcagagtggtacatttgttacagtcaataaaactacattgacatatcattgtcacctgaagcccatagtttacattaaagttcactcttggtgttgtacattttacaggctttttaaaaatgtataatgacatgaatccaccatgagagtatcatatagaatagtcacacttccctaaaaatctctttagggcatttttttctactgtccatacctcaacccttagccctggcctctgtccaaagaccagtgctctctccactgccctattccaattaataatggcatctggcacctcagtggacagtgagcccagtgagagcaggaacagttccctcagtagtggttatcaaactgttaacaatgatgctcagagacacgcccctgactctgagtgttgggacctagaaggcacagccaggcaggtccaggagaactgtctgggtctaagaaggtctgagaaccacctccctgccccaccctgcttccaggccctttttaaggccaaaaggaccacctttgaccctaagtgatggggccagtgggaagaaagaagagacaaggcctatcagcattccagtgctttctctctctctcatccaagaggctcagagcttcacagtccttcaggggctatgtctgaggttcatttcagaaagacccagggtggagaggaacctgagtcctaggagagatgatgttttgtgcaccagagagagagggtgggacaagaggtgtcaggtgcactgtgtacttcatctcatggtcgtggtcaatattgatgtctatgatgggtgggaagatctaggagctaaaccccattttggaggtgaagtcacccctctctacatgctggagaggaggatacacatacctgtttatctagattagaattcaccccaaatcttttttgtctgcagggaaacaagagaccagagcaggagtggttcatggggccattggaggagctggtgttacagccctgctcgctctttgtctctgcctcatcttcttcatgtgagcattttctctgggtcaggcatgggccagaggtgaagaggatggacctggtgtagaagggtcctggaggggctgtgagggctggagaaagggcagggggtgtgatgatgtacagaatccagcctgtggccactgggataggcgtgggtctattccagggccctgatctcagatgtccaaggagtgggaggtagagggagaccttgtgactaagtcttgtttgagggctcctggattaatcccaccctttacctgccaaagtccctcattccaggctcataacaatggccccacagcctgagaaaaccaggctcaaagaccctggtgtctcccatcagagtgaagacccacaggaggaaagcagccaggacagcagtgggcaggaatgacacccaccctaccacagggtcagcctccccggtgagtgatggggcatcctggcatccagtctgtcctgcagacacctcctcccaatgtggcccaccgtcatgccccattcagcatttccagaactgagcttattgtctttcctcctgtttaacagtgtaggttttaatatttttcaggtacgttgaggccaacagatcaggagatgatggccattgaaaagatagtttcttggccgggcacagtgtttcacacctgcaatcccagcacctttggaggccaaggcgggcggatcacgaggtcaggagattgagactatcctggctaacatggtgaaaccccgtctctactaaaaatacaaaaaattagccagatgtggtggctggcgcctgtagtcccagctacttgggaggctgaggcaggagaatggtatgaacccgggaggcagagcttgtagtgagccgacatagcaccactgcactccagcctgggtgacagagagagactctgtcccaaaaagaaaaaaaaaatagtttcttattcaccgttcccgagagggcacaccacaccatgcaaggccatatggagaagcaccagggtcagtcaggaagcagagggagcaaggagaaaatgggacaagagccttcactgtggctttcatggaaaagaatgggcaagacagggtaagcaagctaggcaggtttaggattggctacttagaacaatttcagcagactctggggtataggagttgtctctagttgtctggtacatggccctgggtttattaaggaggattgtggtctggagtgtaagagctcaataaaggatccagctggtagtgtgggctttagattgactggtttgcacatgaaaggtgcacttgtatgcaagtcctttattagctctagaaatctactatccttgggaaaggcagtctctcaagggtcagtaatgccccagatgtcaaaacatcagaaacacttggttgacacacccctaaacatacttctcctgatgggttctccatctcgctgatggcactcttgtccccattacccaaccagagacatggccccctcctgtcccagtcctccatctcttcctgtgccagtatgctacgatgcatgtctgagcttcctctgaacacggcttaacacaaccactcctgagccgagagcccctcttactccttattctgctgcagcctcacctcccatttctcctctccagaacattagcatcacctccctaaaaggtcattgtcccatcattcccaagtttgaaatgcactgcttctctacactcctgaaagattggcattccaacaacttggtctggcatttggagcaggaaaaccagagtccccttcagtgctatgctcccccaacattagccactcaatcacctcaagcagggcaagctttctcatctcagaatcattgctgggctgtcccctcctcctcatatgcctaatagctacctgcccaactccagtgcatccttcaagctctgattttttttttaatttatttaactctgactaaagtgaacaccacagtaaagtttttgaacacagggtcaaccagcacccattcattctgaaatatctatataatcccatttgccaattgctctaggtccttgtgccattctgtatttttataaacacacagtttacaaatataaaatattcctcctatcgggggcttaacatttattggggaaagggatgaaaataatgaacaaataagcagtgcaaatatacatgaaataggcatgaaataagtgctatggcaggaaatgaaatgggagaacggattggacagtcctgggggccaaagaatggcctttgggcaaacacctgcagaaagaaagtgagtacagtatgagcagtagagaatcatcaaggaagcagcaagtaccatggctctgaggccggaacacatctgatgttttagagaaacaaagtaggacagtgtggataaggcagagttacgtgttgggggtggagtgtggactgaacaatggtaggtaggaaatgaggttgaagagacataggagctgcaaatattgcaggatcctaagtccatcatagttattgatgcgtttagagcagaagagtgacatgaactgacactcattttagtgggagtcactctggctgctctgtgagaaactctagtatgtagtatagaagagaagataccagaatagaagatacacagataatcaagccaagagatgactgactcagacttagtcccaagtaagaataatgaatctgatgtggagaaattgggttccggatacatcttgaaggtggagtcaacagtatttgcaagtggagtgatggagtgcatgcaaggcatgagcaaagatagctcacgggctctgctcgataagtgtctcagatgtcataggtgggtccacagatatcatagatgtcatggatgtccaagaagaccccatagatgtcatagatgtctatagatgccaatgatgatgttcatgtggttaactcagaattcaaacttaaaaaatcaaattgccaatgattaaaattgccatccttgaaggagaagtctattttcaagtgtatatcaaacattattttggttaccgtaagtttgaggtgcctctgagacatccatgtggagatgacaagtagcaggcaagtgtctggagctcagaagagggctccacgtgggagacacagaggttgggagcttccctatcaacatccaataatcgatgaatctacaaagaagagaaggggtccacagacacagccctggaaccctccagcatttaatgttagggagatgaggtgtaaatggtgagaaagctgagaatgaataggagccaatgaccaggaaattgcaggctgtagtgttggtggccaagggaagatggggcttcatggaggagaggttggtcatttgtttcaaatgctggtaagtctggtaagatggaatctgagaaatggctatttgaatgtagctaagtggtatgacagcaaagcagatctgatttttctgctggaggaagatctcttgactagagagagttcaagagagaatgggaggagaagaggcagaaactgtgagttgaaggactcttttgagaaacactgccccaaatctagaaccaagaaatgggcctgcaccagcaaatggttgtaccctgtagacttgccatttctccagcatctgctcctgtgtctcttatgataccatgttccctgtttgtgtagggctttgcaccacttgaactaactgcattcccatagcttcccctaccacaccatgagctccacaaggaaaagcctgggttttattagacctccatcattctactctctcctgttcatctgcacactgtcacaatttgcaattaccagtctgtttctgtcttcatcccctgcagtactggaaatcacagggcccctgctctgctctgctccctcctgaggatccagtgcccagcacataggaggtcccagagacctgggaccgagttcagggtcaacagatgtgtgactttggaaattacctaagctctctgagacctagtttcctggtctgtaaaatggattaaaataatagatgccaaagatgatgtcagtgtagctgcccagaatttttccacattagtctctgtgagtattcaagagaattgcgaatcaatcaatacgtgctacatgtgttagataatgaataagtagagccttaattaattaacatttgatgaaagaatgaaagagtgaataaatgttctgtcagagtcaaatttacttcattgaccctctttgccttctcctggtccccctcctcactgccctgctctaacccccttctttcctctccataagaaacaccagaagaagtccaagttacatggccccactgaaacctcaagctgttcaggtgccgcccctactgtggagatggatgaggagctgcattatgcttccctcaactttcatgggatgaatccttccaaggacacctccaccgaatactcagaggtcaggacccagtgaggaacccacaagagcatcaggctcagctagaagatccacatcctctacaggtcggggaccaaaggctgattcttggagatttaacaccccacaggcaatgggtttatagacattatgtgagtttcctgctatattaacatcatcttagactttgcaagcagagagtcgtggaatcaaatctgtgctctttcatttgctaagtgtatgatgtcacacaagctccttaaccttccatgtctccattttcttctctgtgaagtaggtataagaagtcctatctcatagggatgctgtgagcattaaataaaggtacacatggaaaacaccagtcctggtgcagtgagagttcggtgcatactggttccttcccccttgaacagaagtcattagtgatatttgatctctggaactatatcagcaacatgtccatctcacttgctgctcaaaaccccaccatatatgtcttccctgacttaccctccaacatcatctctctccactcctgaatcttctcttttcatctcacctgtcccctactcggatttctgctttctttatgtcctgctacagggaaaatcacatattagcatttggggaattttctaaaactcagagctgaccatagtgaaaatagttccctagatccccaacccacaggaataatttgaagcttctcaatgtgacattctaagtcagagatggtcaaccagtattagcaaagggccagatagtaaacatgttcagttttgcaagcaatgtggtctctattgcaactatttaattccgccattgtagcaacaaagcagccacagacaatctgaaaatgaattatatggccatgttccgacaaaatgctatttatcagaacaggcagcccacgggctgtggtgtgctgacctctattctatgttgctctgaatctcgctcagtctactcttccattgccacatcctacactctatggaccccattctaatgcattcctccctgtctgtttgaatccacatccctcttccaagaagggctgtcaccatgtcatcatcgggcaccatctttttatccttccaaatgacctcaaaggtagatgtctaaattgagatggcagaaagaagctcacaatcatcctcccaaaaagcctaattaaaatgataaaaatcagtttaagaaaaccagccccaaattcatcagcagcacccaaaccattacagggggtgaaagcattatgccataagctcacaataccctttagataaacaaatggaagattctggtgttgcggtggctcacgcctgcaattccaacactttgggaggccaagcccgaaccctgctaggctgtgcccgcctccgcctcccctgcccatgggagtggcgggtgcccctccagggtccacctcacccagcccagacccccagggtgctctgccccatagatgggaggcaactgcccagggtgcaggggcagtgagggcgctgctggctgagggacatgccccatcctggggagggagggtgagtgtgtcagggaggggacagccctgcagttgtcagaggtggggctggagcagcacaggtttcctctggttacaaactactcctaggtgcatacctaacagaaatgcatacaaatgttcttcaaatatacagaagaatgttcatagcagcactaattgtaatgactgaaaataaaacctacccaataccaatcaacagtaatacagataaataaattatggattatttctgcaatggaagaagcaaataatgactccatacaacatgtatgaatcttagaaatataatgttgagtgaaagaacccagatacagaaagtacatactatgtgatgtacttgatacaaggtttagaaacacacataactaatctttggtgttcaaagtccagatactggtgactagtggggcggaggtcaggggctggtggttagtaacgactagaagggggcattagggagttctgggagattctggtaaggatctgttctttggggattttgtttgtttgtttttgttttgtttttgagacagaatctctctgtcacccaggctggagtgcagtggtgccatcatgactcactgcagccttgacctccctggttcaagccatctttccacggcagcctccagagtagctgggactacaggcgtgcaccatcacgcctaaataatttttttagtttggtgtagagacatggtctccgcatgttggccaggctggttttgaacttctgggctcaagcgatcctcctgcctcagcctcccagagtgctggaactataggcatgagccactgcacctagcccaggatctttttttttgatctggctactaattgctcagatgtcatcactctgtgaaaatttttttggtaaagcacttgtgatgtgttcccttttctacatgcatgttactctttaatcaaatttacattaatatttttataaattatccttgttagtatttagctctgatctccaaactgtcagcttccccaggtcaggaactgtactatgtccagccctgtatttttagagtccagccttggacacagcacatgaagtgtactcagtaaatctttgaaatgacctgaactcaatccaggtgggaaccacaaggttggactctgatgaggcctcacaagttacatttccagcccaggcctctctcctaagctctaatctcctatattctcctgcacatctctccccgaatgacctgcaggctccatgcttttaatgcaccccaaactggactcatctttccttaagcctggttgtcttccaggtttgccatccagaggtgtgaggattcccatctgcagtcacggcacctggtactcaatgcctgggtgtcttagtttgtttgggttactatagccaactaccataaactgggtggcttataaacaatagaaatttatttctcacagttctagagtctagaaagtccaagatcaagggaccagcagattccatgtctgatgagggctcattttctgattcatagacaatgccttctcgctgtgtcctcacatggtagaaaggcagggaagggagctctctcaggtcgcttttataagggcactaatcccattcatgggggcttcaccctcatgacctaatcacctaccaaaggccccaccttcaaataccatcacactggtgattaggcttcaacatatgaatatggggggacataagcattcagtctatctcaatgagcaaggagagcataacacccctgtgccgagttctaacctcccaccaagacaaaatttctggcctacattcatggtttcttgtgaaacaggcctccttaccttccctaatctctcagatcccaatttaggttcctctgcctgttcctctaagaggccactgtttgaaccacttcctgaatctggtgagtttatacctcttcctcctcctcctcccttctcctggctccctctcctctggggactgtgagctccactggccacagtatgaaatacctcaaggcccaagtacaaggtcttctccagcatgaagcatccttcaacttcgcactaccctgggacgaatctggaactccctcctctgggatcccacaggctcccatccatctctccaccacagctatactcccaggatctagaatctgttaaaattgtcttaacgaaggcagcagaaggcagcaattaaaattttcacttccttcacagtagccaaaaattggaagcaacccaaatgtccatcaactaatgaaggaataaacaaaatctggtacattcctgcaatgcatatcattcagacataaagatgggccgaagtacagatacatgctacaacgtgtatgaacttcgaaagcatcacaccaagtgaaagaagccagacactaaagatcacgtaccatatgattccattgatatgaaatgtctagaataggaaatacatttctggaggcagaaagcaggtcggcggttgccaggggcttcgaggagggcagtgactgcttagtgagtacatgctttccttttggggcaatgaaaatgtttagaaccaaacagaggttgtggttacacaacgttgtgtatgtactgaatgccaccgagttgttcactttaacatgttcattgtatgtaacgtgattttacatcaataaaaaaaaataataatttaagctttcaagtcagatctccagcatctgaacacctgcctcaccactgaacctcctgctacttccatttgcttatctgttaaatggggataatagcaccacttagttcactggttcatcctgaggattcaatgaatcaatgcttgacagagtggctggtgcatgccaagcccccagctcttgggggctggtcaaagtgaactcagccactagccaaattcttcaaggtaatgattcgattcactgaatgacctgcaggtttccagctatatccttgtggcgccaggcttttcacttgcaccctgattacatggctgaccctgtggtcacagggaaaactgacgtgcaagatagtaaaagtgaagtataaagtctatttttttttttttgagatggagtttcgctcttgttgcccaggctggcatgcaatggcacgatctcagctcactgcaacctccgcctcctggattcaagcaattctcctgcttcagcctcccaagtagctgggattacaggcgcctgccaccacacccagctaattttttgtatttttagtactgtcaggctttcaccatgttggccaggctggtcttgaactcctgacctcgggtgatctgcccacctcagcctctcaaagtgctaggactacaggcatgagtcacagtgcccggccatataaagcctattttaagtctccatggccagagttttgttccacttctccctttccctcttcacccattcctgtaagtcaccaagttcctggcctgtccccttccccttactctcagatccaggtcccatcttgactcctcttccccagaacatggcaaaagcctcctccccagcctctgggctccagtcccaccccaaccagcccatcaccaaaaccatcagcaatgggagctttctaatactcacctctaaccctgtatctttcttgctaaatatcctcccatgcctgcctctttgcctcaagatgatgttctgactctagtgagagttattcaagcttttcccaggccaggaacagtggctcatgcctgtaatcccagcactttgggaggctgaggcaagaggattgcttgaggccaggagttaacaccagcctgagcaacatagagagaccctgtttctacaaaagcaaagaacaattagacaggtgtggtggcacgcacttatagtcccagctacttgggaggctgaggtgggaggatcccctgagccaggcgttcaaggttatagtgagctagatcacgccactgcactccagcctgggtaacaaagtgagaccttgtctaaaaaaaaaaaaaaggcctggtgtggtggctcacgcctgtaatcccagcactttgggaggctgaggcagggagatcataaggtcagcagtttgagaccagtctggccaacatggtgaaactccgtctttactaaaaatacaaaaattagctaggcgtggtggcatgcacctgtagtcccagctacgtgaggggctgaggcaggagaatcacttgaacccgggaggcaggggttgcagtgagctgagatcgcaccactgcactccagcctgggcgacagagcaagactctttctcaaaaaacaaaacaaaacaaaacaaaaaataactttttacaatctcaccctcagctaccacccctcacacatctcagccacatcctagagattgcatgtccctctgtgcctctccatgcttcattcatgtggttctgtctctttgcaatattgtcccctgccctccttctttgcagcacacactcatcctttgagagctggttcaaacatcacctcctcagacaagctgcattccctaccctgtcccctctcccagcccctgtactttcccacagcttggattagagcagtttatcaactgctgttggtgggccagttcaggttcttgactttgcggcacaaaagaatttgagagcgagtccaaagtaagagtaggcaaagaagtttattacaaagcgaaagtacaccctgagaggcagagggagggagagacagcctctagcatctcaaggtaattcctttcatgggaactatacatacatattcataaaatattggtgagtccagcatgaaaggcatgcactcagaatctatgtgctctaacacgcattgcatgtatcattagcatataaaatctccacctaggggtgtattttctactattcaaatgaggaaaaggtcactataagctaaactttgaacatagctgcacacgcagagccctggagaagttcccagctcccccaaggcaggaatttgtagctcacagcttcttgggtttttggtgttgattggctggagactggggaaactacaccatgaataagtggcttttgttctctttcccaggccacattaacaggaacttgcaaccatctggtggtctgcttgtatcctgtaggactgtttatcttgcaagagttaggtgctgactcacgagagtgaaaaccaaagaatctgcttcgaaagggatccatggggctttgcgcaaggatacaagtgagtatggcctcctaaccttacttatcctgcctcacaacctcaacgatattcatattctggcatttggggctggataattctttggtggtggtggttaggggagggtgtggcaggtcaggtctccctaaccgctgaacaggcaggcctccataacaactgtctcagcactgattgagtggttaagttaaatattaaaagctgacagagccagtgccctcatacaaaggctggaatgtaacaaaagcccaccaagaattttgcccaggccttttctgggccttgagcataacaagataatgaaggaattcttaacaggacccgtttaggattaaacaagttttattggggggtctgaagaaactcctctaagcctccacaaacaagtttattgggggtctgaaggaactccccaaacctccatgatttagcaggagacaagataagggtaatcaccccagcacctggacccatttagtttaaataaatttactgaggctacagaggaagatcttcaggactgacatcttagttacagattggaagaagttaatcgcttacgtccagatgaatgcactcttacatgtagacaaatagcttagaaggtatatgagctctggaaaactttgtaattttgagttggtctggcaatattttccagatcttctccctgtgcccagttacagaaataaactcccttctctcccagttcacctgcatcttgtcattgggctaagagaataagcagcctgacccttggtttggtccaggaacaagggtgcatggtcagatgttgagcagcgtctctaggttgtacacacaagatgtcagtagctcccctagtccagttttgacaaccaaaaaaggactccagatattgtcaggtgtctatcagggtgcaaaaaagcaccaaattgagaaacactgaactagagccttcctcctctgtattcacatagatacttgaacaaaatgaactttctctagttcttcaagttcactacgaaaaccactatgttgcccaatttctttttttttttgagacagagtctggatccatcactcaggctggagtgcactggtgtgatcttggctcactgcaacctccacctcctgggttcaagcaattctcctgtctcagcctcccaagtagctgggactacaggtgcctgccaccacgtccagctaatttttgtatttttagtagagacggggtttcaccttgttaatcaggcggtctcgaactcctgacctcaggtgatccacccgcctcagcctcccaaagtgttgggattacaggcgtgagccaccgtgtccggccgttgcccaatttcaaaacaatttagtgcatttgaagaagtttatcgcaaagcaaaagtacaccctgagaggcagacggagggagagatagcccctagtgtctcaagggtctcaagacccccagtaaaacttgtttaatcctgaacgggtcctgttaagaattcctttgttatcacatttatgaagacggtcttgagaaatcctgaggttctaatttctttgttttccaaacttttcctgcatgcctactacatgctacaccaatacaggagttaagaaggaattacttaggcccagagcaagggcatgggagtccttggtaaggcttttctttttaatgaaaagcagccccaaatcagtttctaacaaagagcagcctgcaacctgggagcttgcatgagtgaatgacggcaggaactaaggaatggacattttcaagatggccgctccatcttcccttctctgtcacgtgctgtaaggagcagacaaggtggcactgatcaactggaaagtccatttgcataagaagattagggtggggttaccagccttccttgtgtgctatttaaacattatacccgatcaaaccaatctatgagccttatgtgaatcagacaccacctcctcaaatgggactataaaatttgcagcattcaccaccagatggtctttttttccgttccaagaccccttcctctttagaggaagcagtttctctttctcttctcttctacccattaaacctccactcctaaaatcctcgtgtgtttctgtgtcctaaattgtcctggcatgtgccagcggaaccccatgtttataccccaagtaacctagctgcttcagctcctccaagaacatcaaaaggaagaagatacagtccctggctcatatgaaaatataaacttagacacattaaaattttaaagaatttatttgagctgacattcatgaatccagaagtgccaaaccacctagtgggcacacaaggaaaacttttataaggtattcctggaatcaaaacaaagaaaatagtttcatttggttaaaggggaacggtagccttaaagtttgtaattagaggtcaacttgcagtttctgattggtaaagtctctacttagaggttagtaggcagtttcgattggttaagcctaagtttcatttttctaggatatgaccattcactttgagttaggtttgaatttgcttacttggaaacaaaggccttggagccatctcagcctaatggcttcccagttagttattttgacaattgggagagctcaagttcatggggtaatgtttgggaaagggacagaaataggtaacttactgaaacacagtatgataaggttcctataaagatggcaaaggatataaattatggggataattatggcctagggtctggggacccaagggcaagagctttcagggatgggaaagaagttagaaaaggcttctcagaggaagcccctttctaactgcaccttgaagggaaagcaagagccagcaagcagagaagcgaggaaaagcagtttaggtactgataatatcaattacaaagcaaggaggtagaagaggggctggcagatgtttaggtaatagcagtcagtctgctacagctagggtaaagggaacaaagtcaggtcccctctcgggaagtctatctggggcctgctctgcaagctgtaagggccatggagtaaggccctggagggtgaacatcatccttcagtctgtcacattaaaaaaaaaaaatctgcacataaataaggcaagattttatccaaaacaattattccaataaagggagaagaatctttgcagcagtggaaggggaactgctgcaacagggaggtggagactgttgtaatagggagtggaggtctcccatgtaccataaaacaaaaccaaaaagtgagcttctattctagtggcacagtcaaaccataaacaaaaataccattagcaaatgatatttagcacaaagtgtttttgttacaggaaaggggttctgatccagaccccaagagaggattcttgtatctcttgcaagaaagaattcagggctattccatagagtaacgtggaagcaagtttattaagaaagtaaaagaataaaagaatgattacttcatagagcagccccgagggctgctggttgcccatttttatggttatttcttgatgacatgctaaagaaagggtgaattattcatgcctcccctttttagaccatatagtgtaacttcctgacgttgccatggcatttgtgaaccgtcatggtgctggtaggagtgtagcagtgaggattaccagaggtcactctcattgtcatcttggttttggtgggatttggctggcttcttttttttttttttccttttgagtcagagtctcactctgttgcccaggctggagtgcagtggtgcaatctcggctcactgcaacttccacctcgcggattcaagcgattctcctgcctcaacctcccaagtagctggggttacaggtgcctgccaccacgcccagctaatttttgtatttttagtagacagggtttcgccatgttggcaggctggtctcaaactcctgacctcaggtaatccgcccgcctcagcctcccaaagtgctgggattacaggcgtgagtcaccgagcccagccttggctggtttctttactgcaacctgttttatcagcaaggtctttatgacctgtatcttgtgctgaccgcctatatcatcctgtaacttagaatgccttagccctctgggaatgcagcccagcaggtctcagcctcattttacccagctcctattcaagacggagttgctctggctcaaatgcctctgtcattttgaaagtgtaatgggtaagaaagtgcgtgacggataaagtgtgagaaaaaataaacagggttaaacaagaggaacggagtcctcagggttggagaggagtgtggtttcatcagcacgggctggaaaggccttgctgggaagaaaattggcccacaaactaccctggcaccgcccccagctgcggattggctcaagccctcaagatccaattgggcacaaaggttggaggagggagttgcagttgcagttcctgattgactctggcagccgtgcatcagctcccaggggcacacgcctgtgggcacaatgcttctgcttcattgattggctgtagaaaaagctcatgcagcctctgattggctataaaataagcccatgcagcctctgattggctgcaacataagcccatgcagcctctcattggttgtaaaataagcacatgcagcctctgattggctgtgtaaagtaagcccatgcagccgctgattggctgcgggtggatgcactcacctaaggatgcgagctagcaggtcttgcagcggctatcacgcccctcacgccgctatctctgtgcagccgactgaggatccctagtcgcataaggctgtgcctggcctgttggcgtccctggcagttgttgggttctggcggttgttgggtccctggcagttgttggcggttgttgggttccttcattgaaactgcactaactgggcttccagtcagcgtcagtcagcggatccttgggccgtggggcagccgcaggtcggttaggccaccagggcggctctcgtgccagtgaggcccctgagagccctttggtcagacagaggctaaatctgaacagtcaggcggtgagattaagcatagtcagggagttcgccaggagccagcgttcctcagcctccaccacgtcagtcacctggtcagccagagggcagctggggcgacatccatctaccaagaaggtaagcaagcggcccgtgggttcacaatcaggtcagtgcccttatgagtcaacggttagtccctttgaaaatcagttcatgagaaaatccactcccttcagaacctgccctgttcattggttagttaggctcccgctaagtcggtctcttggtaagttacacccctgcaaggcacccagtcattactcacacagttatcccatgtgtgtctatcagtttcattgttagttatcctggctttccctagaaaatcgttttcctcaccataaataggtcagtcattagtaagtcagcccttcccttagaaagccgaacacctttgcatcactcacaccctgctaaggaaatacacagatggaagtgtgctgagaacagagaatatcctgagccctttggaacaagagacagaaggaaaattgagagacatgatggtgaaggaaaattgagagacatggtggtcaaggaaaataggctgggcgcagtggctcacgtctgtaatcccagcactttgggaggctgaggccggggatcacttgaggtcaggagttcaagaccagcctggccaacatggtgaaaccccgtctcttccaaaaatacaaaaattagatgggcatcgtggcccgtgcctgtagtcccagctactcgggaggctgaggcaggagaatcacttgaaccccgtaggcagaggttgcagtgagccaagatcgtgccactgcactccagcctgggcaacacagcgagactctgtctcaaaaaaaaaaaaagaaaagaaaagaaaaagaaaatataatgggtgcatgacgagtcatcacatgtatgctctaaaactgatggagagaagaaagaagaaatcagaattttgtacttaaatggatcattacatctccagcagtaaaacccactcatgttacacatgaggaaataagaagagggaaaatacttgaccacagttattcagtgctttactggcaaatcctggcccaggacctagacaaggctcattccgaccatctaacatgggcttttaaacagaagaaaggggaaggaaaaaaaaattgacaatgcaaaaagaaagtggatatgtggcgtgaatgagagaggcatttaacgacctggaaacttgggcgatatcttttttatgtgagaaggaaaaagggcaatcagtctggaggctaagggttgggagcacagaccactcagagaggtctgttaaaacatgccgaaatatggaataggaaaggacagggctggttccagaactctgggaagggattaggggtggtcaagagtggtcccaggctgagtgtgttggttcacggctgcaatcccagcactttgggaggctgaggtgagaagactgcttgagcccaggagttcgagaccagcctgggtaacatagtgagactctgtctctacaaaaaaaattttttcattagctggacctggtggcttgtgcttatagtcccagctactctggaggctgaggtgggaggatcacttgagcctggaaagtcgaggctgcagtgagccatgttcatgccactgcactccagaccctgtgttaaaaaaaaacaaaaaaaaagtggttccaagttaaatgctgataggagctaagcagggaacctaatacatagtaactaacattttttgattgcttaccaaatgtgaggttctgttctactgactcatttaatcttaacaacaactctaagatgggtgctattattatccatgtttttaaaatgagcaagtaggcctagagagaggtgaagctacttgcacactataaaacagctaaccttcatatctaggcagtttgacttgaatttaaaatttaaaaaaaagagagagagagaagctggttgtttgaattttttgtgaagtgctctgattattaaatgttatcccattttaaaagttagttttaaaaagtaagcatttgtaggccaaacaaaattcatttatgattgtttttagtctctgaagcaggctgacagtgagggaagtgacttacccagaatcacccaggaagtagcgacaaagattaggtcttctgacttctggtccacttccaggaaaaatctaagtatactgtgtgtcacatcagggctagctgatttattcttatattttattcatgaggaagtgaatttggagaggagaatgaacttcaccatgcttatacagcagtttttaaggcaaaatagaatcatgaaaaagacaccacagttgtagtcaaaggttgagtctgaaatctatgaacgtaacggctgcatgtcttggggccagtcatagtacttttgtggatctctgccttccttttggaagtgttgataatgagatgtacctcacagagttgttgagactaagataaaagataaaatttctacgtctctagagttgtaaatggcaaccatagtttctcattagatgttaaccaaaaaagtagttaacagtcatggcatgattcagtcattcccaattgattcacagcagggcacagtggctcatgcctgtaatcctagcactttgggaggctgaggcgggagaattgcttaagcccaggagttcaaaaccagcctgggcaatatagcaagactcgactctctctctacagaaaatattttttttaaatgaattgggtctagtagtgtgcccttaaagtcccagctactcgagagactgatgtgggaggactacttgagctcaggagttcgaggctgtagatagctgtgattgtaccactgcacaccagccagggtgacagggtgagactccatctctttaaaaaaaaaaaaaaaaggattgattcacagtatccaaatagtagaaacaacccaaatgccatcaactgatgaatggataaacaaaatgtggtctatccatacaatggaatattattcaacgataacaatgaaaggagtactgatatctggtacaacatgaattagccttgaaagcatgctaaatgaaagaagccagacacaaaagaccacatattatatcatttcatttatatacaatgtccagaataggcaaatttataattacggaaaatagattagtggttgcctacaactagggggtggagttggggtttggggaaacggggagtaaatgttaatagatattggtgtttttagggaggtgatgaaagtgctctggaattaggtaatggtgatgtctgcatatctttatgaatatactaaaactcctaaattgtgtgcactttaaaatggtgaatttatggtatatgaattatagctcaataaaaataaaaaaattaattataaaaaggttagctaccagtagacccatggctaaataaaaacctgaaaattttagggaaaactagatactcacatggaaattggacacttagtttataccaaatacaaaaataaactcaaaatgggttaaagacttaaatatagccaggcgcagtggctcacgcctgtaatcccagcactttgggaggccagggagggtggatcacttgatgccaggagtttgagaccagtctggccaacatggtgaaaccctgtctctactaaaaatacaaaagttagccaggcatggtggagcacgcctgtaatcccagctactcaggaggctgaggcacaagaatcgcttgcacccaggagatggaggttgcagtgagccaagatcatgccactgcactccagcctgggcaacagagtggggaccctgtctcaagaaaaaaaaaaaaaaagacttaaatataagaactgagattgtaaaactactaaaagaaaacatcggagaaaacttctgtatatttatatgtaatacacaataaaaattattggtttgggaaatagttatttggatatttctgcaaaaacacaggaaacaaaagcaaaaattgacatgcaagattgcagcaaagtagtttctgaacagcaaaggaaacaatcaacagagtgaagagacaacctacagaatgggagaaaatatttgcaaagcatccatctaataaggggctaatatccaaaatacataaggaactcaaacaactcaatagcaaaaaaatcaaataacccaattaaaaaatgggcaaggacctgaataggcatttcataaaagaagacataccaaaatggccaacaagtatataaaaaaaatgcctgacatcactaatcatcagagaaatgcaaattcaaaccacagatatcaccttatacctattagatgggtatatcaagaaggcaaaagatagcaagtgttgatgaggatgtggggaaaagtaaaccttgtacactgttggtggaaatgtaaattggtataaccactatggaaaatagtatagagtatcctttaaaaattaaaaatagaactaccatatgattcaggaatcccacttctaggcatgtatttgacagaaatgaactcagtatcttgaagagatatctgcactcctgtgttcattgcagcattattcaccatagcccacacgtggaatcaacgtaagtgtccattaatagatgagtaaagaaaatattatatatgtatacacacatgcacgcacacacacacacacaccccattcaaataatgtcattttgttcaacattgtctaatcataagagaaaaaaatcaattcccagccagtaccagtatctgtgtggagtttgcatgttcttatatatggtaaaattggtttcattttacatcatttcacttaaagcagcagtttccaagaactgaatgatgatgttaagtgaggatttattgtgcacacacacatacacacacagtggaagttattcagccttaaaaaaggacatcttgccatttgcagcaacgtaaataaacctgaaagacattatgctatgtgaaacaagtcagacacagaaagacaagtactgcatgatctcacttatatgtagaatctaagaaagtcaaacgcatggaagcaaagtatagaatggtggttgccagggctgagggctaagggaaatgagatattgatcaaggggcacaaagtttcagctaggcagaatgaataagttctggaggtttcatgtgcaccatggtgactatggtaaataacactgtactgtatacttgaaattttgtgacagtaaatattaagtgttctcaccaccaaaaaaatggtaactgtgaagtgctgattatgttaattcactggattgtggtaatcattccacagtgcatacatacatcaaaacgtcatgtcgtacaccttaagtatatacaatttttatttgtcagttatacctcaataaacctggaattaaaaaactgaaaattctataatctcatctctgatcactgctctaaccataggtaagcactggtatcaaattatacatcattctagatctttgttttactcattcatgtatgtatagttttgagtgtattatatatgaatatgtagatacatatttacatattatatatataaagcttttatataaatgacaaatgatccagttttcatttaaagattgtgaaatatttcagacatatagaaagatataaatatggtataatgagcatatacccaccaccagcttaatattgaaaacactggctgggcacggtagctcacacctgtaatcctagcactttaggaagcccaggtgggaggacggcttgagcctaggagttcaagaccagcctgggcaacataacaagatcccatctctacataaattaaaaaattagtcaggcatggtggcacatgcttgtagtcccagctacttgggaggctgaggtgggaagattgcttgagcctgggaggtcaagcctgcagtgaactgtgaatgctccgttgcactccatccagtctgggtgacagagcaagaaactgtctcaaaaaaaaaaaaaagaaaagaaaagaaagaaaacactacccctggtatactcccttccccaaacacatctcccactctcaaacatagagatcgctgctattctgaatttgacattttattctgtgtactaaggaacttaaccttgcctgaagagaagtctggcctttgcccttggcttctggaagacactccctagctcttagaatgtcacacctcataggggtgtctttgtttgcccagggaccttgcatcacactgaatattctagaaatgtgatttaggatgagggctggccacaccagataatgttaacaatgtgatttagagtggaagcaataccagatagtctaacaatgtgatttagaataggggctttggatcaaatggtatcagctcaacttcaggaggagctggatgctaagatccaccatgagggaagtcaccatgttacacgatggaggcccaataaaaacactggacacaaggcttgggtgagcttctttagttgacagtactatgcatattgtcacacattatcaccaggaaagctaagttatgctgtccatgactccacagggagaggataactagaagctttgtgtggggaacttctggcctctgccctgtatgtcttcccttggctgattttaatctctatcctttagttgtagtaaacagtaatcacgagtataacagctttcagtgaattctgtgagtacttctagtgaattaccaaacctaagggtagttttggggttccaaaaccttgcaaatgatttgagaaatgagggtaatcagggatccttgatatcttcagttggtgtcagaaatgaggggatcttgtggaccattccctaacttttcagttgtatcagaaatgggattcactagaacagccctgactcactgaaacatatggtttgaaaagaggaaggatgtgaagtcaagatgataagcctttgattcctgggctgtcctgcggtcacctgtgcgtatagaaatgcagctgttctgcaaacagttacaggaggtaaaagttaccattgctttttcaatacaatggatccaacccccaaggagctgacccactggatgcataaggaaacaaactaaataggcagtcccttggctatttttatctgtaatcgttaaaatgaaagtggctgaggcggatcctgatgctggcccaatcttgggctctggccagcctgagctacagctgctagcctcagggctgtggctaaagggaaaagttaggctgaaatgacagatggcaaagaaaattagagtggttcaccagagagtgagaaaagacgaacatttccaagagggtggaaatctttataaacagttattaagaaatgagatgagttaagtggacattgagggagtctaaacaaaggtctcagtggagcactcttagaaattaggtggagcagtgagaacctagacttgccctccagtgttgaaggtcccccatcaagtctgctatatttaccctagtttggaggaattttagaagccagaaggcaaacatgacaatgggaaatctgacctcagatctcctgaggggacgaacatgtgatctaatcaagataaatgacaaaagggcctgggttgcttggcctgacccctaactgaagacccaaagtcatatgcatattagtagtaaaatagtcaggggatggataagagatatttctgggactcatgtgggagtcttatacctgcattccaaaaggttggtgaaattctaatagcatctatggttagattgcgaagacataggattacaaagtggatgagattcaggcgaaactttggatgaaaattggaatgtttggacagactatgtaaatatgttatgtgaatgtatttacctaaatgtattatgaggaaagatattgtgtccaactatggaagagttcccctacgtactattatgaaacagaaggcatgtaaatcttcccttcaaccaatattgattgaatatgctaaataggaaccaataagattgcccaagcccacactaattgttaatttgaaacagtacaggatatctggtggacaaaacatgttagaagcttaacgtttgctttatttaggcagactggagctaaggccagtgagcaccacccagtggtgaatgctgggatttggggccagaaaatttccaatggagagacaactagctgcctattgggctttgagtctgccccatcattgaaggatataataatcctgacacctgaaatcctcatgatgtgtttgtcatgttggaaaaacactgtagtaaggaaggccatgcccaaaagagtctcgtaataaaatggaaattgtttatacaggaacatgctaccagggaaatgcaaggaggtcctcgttatatttatgaacaggtggctttttccctactgaagagctgcgagatcctattattacttgaatgatgtctattaatagctcttgattgaccaactaagagcggtttgatttatggatggcaattccaaagtgaattaataacatcctgtttggaagactggcactcatactgaggaaggcaaaaacaagtcacttcagtgggctgaactgcctccacatttgggtttttaccaattcatgggcagtggccaatggcctggccatatggtcaggcagatgggcaatgggaaactgtactattaaaaggatgcctatatagggtacagccttatggaattcactatagccagtatctcaaaagacctgttcataccccctacaaatgataaaataaacagagaaacagacctcttcctcccaaaaaggcaattaatatcctaccttttatgctggacatttcttggcaacttttaaaggatttttactacttgtgtgtgcgttcttaaacacttgattttgcccggtttttttcaaattttaaagaaatgctcatacattattacttatttgtgtctggctttgttcattcaatattttatttgtaagaatggtccatgttgttgcatctagcattagctcataggtttttgttgctgtgtagtatctcattttttaaaattctctgtttactggcatttggattgtttacctttttagctatttttaaataataccactgtaaacatttttgcattcctttgtggcgtacatatgcacaaacatttctataaagtatacatctgggagtggaattgagggtcatagagtatgtgtatcttctgctttgataaataactttgttgccctgatttatatttccaccaatagtgtgtgaaagttgagtaccacattctcaccaagacttgatatattgtcttggatatgtactggtatctgatggttttaacaggcattttgctggttattaatgagattttaaatattttcatggaaattttattaagatttgtcttatgatccagctgtggccaatttctgtaaacgttctctgtgtgcttacaaagaaattgtattctgcagttattgattgcagtattctctatatatttttggtcaaatttgctgatcaagttgttgaaatctttatatattccaatagtctgtttgttctgtcagtttctgagagaacagtgattaaaatgtcacactactattgtggatgtctgtttctccttttatttttgtagattttttgctttatatatttttggactatgttagtaggcaaacacaaattttaaatatatactttattcctgttaatgtcagcttatcattaggagatatgccattctatctttggtaatgccttttgcttaaagtctgctttatgggatgttaatgtaggtatgtctacattacctggctttctggttggtatttgcttggtgtatgttttcattctttggttttttctttttttctttttttgagacggagtcttgctctgtcgcccaggctggagtgcagtggcatgatctcggctcactgcaagctctgcctcccaggttcatgccattctcctgcctcggcctcctgagtagctgggattacaggggcccgccaccacacccagctaattttttgtatttttagtagagacggggtttcaccgtgttagccaggatggtctggatctcctgacctcgtgatccgcccgtctcggcctcccaaagtgctgggattacaggcatgagccaccgctcccggcccatttggttttttaactgtcctttacacttatgctttggttgtgtcttttgtaaacagcatggagtttggctttgcttcttttttccaatatgatgatcttagattcataactggataatttaagccatttatatttagttaaatcactgatgtattggagtttaaatctaacatctaggtacatgatttctacttgtcccaaccgttctattctcttttgtatcccttctgtttgtttctctgtctttattttcaaacaagcttttaaatcaaagtacaattttatacagagaagtattaatacagatagtaagtatacaactcaaattatcacaaagggagcagaccagtgtaaccaccactgaggtcaagaaatagaacattaacaacaccccaaacactccactcatgtactacaccattcattaccccctttatccttgctatgttctggatgcaagcacgttgtatgtgttgcaagtatgttctccagccctgcaacttgcatttgtcctccttaatggtatcttttgatgcagaaattaattctgatacagtccattttatccatatttcctcatagctagtgctttttggcccttttaaagaaatatttccttacctaaaacttaccaagatactctcctatgttgtattaaagaattccactgaccaatgtggtagctactaactacatatggctattgagcccttatattatggctagtctgaattgaagtgtgctgtaagtgtaaaatatatacaagattttgaagagtgtataaagaatgtaccaaatcttaacaattttgtgttgattgcatgttgaaatattgggttaggttcaatatgaataacctagtgaataacctaggtttctttcactaggttaaatgaaacatcattaaaattaattttacccatttcttcctttttaatgtggctgctagaaaatttaaaattatacatgtagtccacatttataggtcacattatatttcttcacacagcactgttctagaaaaaaagtctaaggactttcccaatgtccctagaagttatttttatgtatgacatgaggtaggggtcttatttccttttgctgtatggctgtccagttattctgacacaatttattcaaaagagagtcctttaacttctatgcagtgccatatttatcctaaaccaagtgatcacatatgtataggtatttttctaaccatatagcctgtcccattggtatttttatttatccttgtgtcaataccatactctatgaattactatgtatgtatgtatgtattttatttatttacttatttattttgagataaagtcttactctgtagcccaaagctacagtgcagtggcgtgatcacggctgactgcagccttgacctccctacctcaggtgatcctcccaccttaacctttcaagtagctgggactacaggtgcgtaccaccacacccagataatttttgtattttttgtagaaacggggttttaccatgttgcccacgctggaattactatggatttttaagtcatgatatccagtaggaattggaattgatcatttttttgagacagggtctcgtgctgtctcttttttaatagaaatttactgagaacaaatttattaaataaatgtctacatgggatataaaagggaacattgtgccatgctatacaatgttacttacaccattcatttcaaattttatggcaaaacaattatactgtggtagggagatgttgttttacacttctcaccaaactaaacattatcatatttttcctgagagaatgtcaacactttgctatcttaagtgatcacaccactgcaatccagactgggtgacagagagagagaaagaccctgtctcaaaaacaaaaacaaaccgggcatagtggcttatgcctgtaatctcagctgtttgggaggccaaggcgggtcaggtgtttgagaccagcctggccaacatggtgaaacctcatctctactaaaactacaaaaattatttggccatggtggtgaatacctgtaattccagctactcgggaggctaaggcagaagagtcgcttgaacatgggagatggagattgcagtgagccgagatcgagccactgcactccagcctgggcgacagagtaagattccatctcaaaaaacaaaaataaaacaaagaataaagcagacatgacactgaggcttcacagacaatcttagttgcctccctgtccgtacgtgctcatgagcctctcatcccatataattcctgcttctccaggtgaacaggccttcacgatgaccagagacagaagcccctgacttggctaaagatacttctgctctccccatccccacatcctctttcagttacgcatcacctcactccttctgaaccatatggttctgatgtcagagccagtgtagtaaagagcttctgctgttcctgagaactgttgctgctggaagtgatgcttccactgctacagctgggtaagtaaggtgagaagcagcactggaggtgtgtttggaagccaagactccagggcctgggtgttggcagggcagaggatgggctatggaggcatggagaaagaggacatatgggcataagtaccaaataatcaacatgaattagacagcttctgtgtgtcagattttgacagggctggtgtgtctgaagcaaatagcaaattgggcaagggagagggatggagagtgtaggtgctatgaaggcatgagagcactaggagctgtttcagacattactggaagccctgaagttaagtttttcagtgtttctgtgggcacactttgccaggtggaaaagacaattcagaggacagccatagaggggtccgtacatgagagtcccccgcagattcctcaacagcgccccgcaagtgactcaggtgaagagaccgagatcaggagctactggttaggggaaaattacccctttcttccagtaacctcaaaaaacttcaacgaaaaagtgtgtgtcaacactgaagacagattcctcattattagagaccttgatgaatgtgactgttccctcctaatccatgatattcatcaaatggccaccatgtcctacctgttctaaatagagcgaggcaatttccagcattcttacacagaagatgccatagtacatttggcttccagtgaatgttccaccaaagaccacttgagaccgggaagaaggaaattaagaaaggtgttctgtttattgaatgggtaatacttcactacgcactgagctgggtgcactgcaaatcttggggcattcattcttataacgatgataatatgagataggttcagcaaatatcccgattttccaggctaggaaacagcaatgataaggggagtgacttgcccagcagcacccagacaggaagtgatggagggagaattggtcatagagcctaagaggaacattgcaggtgggaagaagagaagcagagtaggaggtctggcttggacttctagccttgcagggtaggtgagggatcacagacaatgtagagcctcaggaaatttacttgccacccctcaagaaggtctagcgatcaggttcaggccagatgaggacagaagatagaggggaactggtctgggaggcctgaatcctgtgggcttccagaaagtccttctgaagctccttgtgaatagcaagtaaagagaaggctgcatgctggagaaactggaagagggaagccaggatgccttgctgactcctgacccttcctccccacagtacctgctaagctgctcaactcctcttgctccttggagaagacactgcagtgcagctgttccttccatgggattcccacaccctctgtgcagtggtggatgggaggagtccccgtgggtgtggatggcatggatggcagcctccaagtgacttccaccatgcttggcccctgggctaacagcaccatcagcctaactgaagagccagaaatgggcatgagacttctctgtgaggggaagaaccaaaacggaacccatgctttgagcatcctactgatgtcaagtgagggtggagggggctcggtgactgggtgaggacaataagcgggatggggacagtcactggggctagagaatggagcagagttttggctccgatgccaaacttctcacatgctctctgcttccaggaaagagttctttggctgcccaggccttcgtgaaagggctgatccagggtgctatctatgcgggaattgtaattgcgctgctcttcctctgcctcctccctctcatgtgagtactagggttaatattcacccgcaagcctactaccgggcaggccctggctgcagccctggcacagagagagcaaagacaggacccctcccctcaaggagcttagggtctaaagagggaaagatgtaccaaacatggtcaccacaatccagggccatgaggactatacagaaccgtaaaactgtgtcataaaacagacactttgaacacattttataaaggagaagaccaagaagggacttggcagccctggaaaaggcagcagcgagtccccggggtgctgtctgtggtgggcctgcaagggttcagtactcgttagcttggtggaaagtattaatagtacaggttgagtatctaatccaaaaatccaaaatccgaaatgctccaaagtccaaaagttctcgaggcaccgacataatgccacaagtagaaaattccacacctgacctcatgtgatagttcaatgcacacaaactttatttcatgcacaaaataattttaaatattatataaaattaccttcaggccatgtgtataaggtatatatgaaacataaatgaattttgtttttatacttggctcctatccccaagatatgtcattatgtataaacaaatattccaaaatctaaaaaaaaaaaaaaaaattgaaatctgaaacacttctggccccaggcatttcagataagggatatctaacctttgtatgcagacgcccagaggcatgtttgaggcatttccagtgtctttgtataatgtcaggtgcattgagagtaccaggtaatggctaaaaatgaggttgaaagacatccttggtgttggttcacagggtgttaaaacttagctgcatgtattagctagaagcatggagtgggaaggggtgagttgcaggaagtcaggccagagagacgggcaggggagcctgtccagacagcttggactgaatcctcatttcggagccatggaagagtgctaagctgtgaaggaaagcttgagcttggggtgggacacagattagagagagtgagagccagaaggtcagaggccaggcaggaagctggtgcaggggactaagcaggaaatagaaggcctgacctggggcaagtgatgaggggcagccagagaggtgggacttgggcatggctggctatggggagacaaagatgaggagtgaggtgtcagggcaaactgaggagctattttcaaagtataatcaacaggacttgaagaccagtaacaatctctctgccagttgcaaggccctttcttagctgacctcatctgagccccacagcctaataagcagggtatcccccttattcagagtgtgaaactaattcccagagaggatgtgtggcttgccctaggtcatacagcaagctggtactgttgttgaggctctaaatcagaagttctggtcaagatagagcccatttggggattcagggagatggagagccagaaccaatccaaggcttatttccttagagtgaaacatatcagaaagaagcaggcgaagaaagctgcagcgatcagagcaaaaaagagctctaaagtcagagcaagccaagaacttgagatgtctctgaagcctgaggaaccaggaaaacccgtagtcgccacattttctgagagccggatattggtatgtacctattgtgtctggaatctagtctatcggaatactgataataagacccacagggaaaggagcacacagtgttttgaaggtgttatcatcctcagtcttgcaggatacctaatgctagagtgtgctttcaggtcattttataaataggaagctaaggcccagagaggagaaggatgaaagttaagagaaacaatttaaagaacaattaaaatcaatttacacgcacacaccattacattgaatccccactgaaaaggcagttggggaaaatcctaatagcagttgtagcatcagagtggaaaccaaggatttggcctctgagtgtatggccggcagcagtcagcttggtgtagatgccacaggccaagtcagcctgaagtggttagagattaggccaagcccaggttactccttcattcaccctgtaccccacatcttcagcagggcttggaagatacagtgtccgaggttgctatgcctcactgttatttaccgtttatgattctccagaatcagaattatcctgctgccctcctaacaccctgcatgaacagttggtgtccttttgtagataagccatctgttaaattccaccaatatttcctgcaatatctcctaatctttgtgctcgacaatgctggggtctcagaaatgggccaaacctaggccttgtcctcagagagcaactagactggtcgagaaggcaccttcacagtaggggatgctgagccaggagttacggtggtgcagaagagggagggaccaaacctacctgaggaagtcaggcaagattccctgaggagtctaaggaacagtcagtgttatgggtactgaagatgcacagagaggaccagatggagaagaccgagttgcaggctttaaccatggggttgtgaggaagggctaagccagtgctcactccatgttgccttaattctgtgcacaagggggtgtctttttaagatttggatacctcacctctagacctgttccaacattcttttttctttgttctattttgcacctcgctttcaggaaaagcaagataaacgagccagctaagcctgtggaacatgcctcatacctggagtcgccattatccctggaattacaaagatctgcaaaatttatagcgctcacagaaaccctggaggctgtaataaacctggagccccctggactctcctcagctcacaaaaccctctcaattcctacacatcccttaacactcattctccattgaataggtggttactcttagacctagtcttagaacctctgaagacacactttgtaatttgttgtttggctaaatgagaagaaatctgtgccaccctgggaaggtgtcaaaagaaggaaaaatacatgtgacaatatgaatcaagtccatcagcaagttacttttgagcgcctactgtgtgtcagtgcctgagatacacctacaagagcgccaggctttcaagccttcatatctggatagaatcccaacttcagtgcttggtggctgtctatctttggacaagatctttcattccccatcctttgaacatcacatgacccatatctgggtggagaatgggtgaaaagtactgttcagagatgcaggtgagaaaaaacatgacgatgggccctgaatgccaagattcattggagctttggagctttatcttgtaggaccttatcctgactcccttagaatgtaagttccaagagaacagggactttgtctgccttgttttctacttttatcaccagcacccagaatgatgcctaaaatacaataagatctcaagaatgtttgtcaaatgatttaattaattataagctgttttaaggtttgaagcaagcaagtagagtgaccagatatagacagaaaaatcatttccgtaccctgaccccacatatgatatatttagaatgggtaaggctggaggtaaagatgctagttaggaggttatcgcaatagttcttggccagattgaaaggcaggcatgcaaggaatgggaaagggattctggcattagaatgaaccacaactatgtattgttcctctcagaatggatgacaacctcctttctagccagatgctagtagattttttttttttttgagatggagttttgctcttgttgcccaagctggagtacaatggtgcaatctcggctcactgcaacctctgcctcccgggttcaagtgattctcctgcctcagcctcccgagtagctgggattacaggcacacaccatcacacccagctaattttttatagttttagtagagacagggtttcaccatgttggccaggctggtctcaaactcctgacctcaggtgatccacctaccccggccgcccaaagtactgggattacaggagtgagccaccgtgcctggccagatgctagtagttttcagtaggtggaaagagggtcatctcttccctggggcaatatttgtgggtaaatacagtgatcctgtagcaccagctagatggtcatcttatactcagggtggacgtttacgttagcccccacatgtataagcacctctcacaggcagttcacatttcacagaaatatcagatgtgccaccatgtgccagataatgaggggaagaagtaagacactcaccctgcctccgtggagtcatggtctacatagacagacgatgaagaaatgcagacgaatttatagcttaaaatgttgataagtgctagaaagaaaacaggacagaatactatgagaaagcacaggaaaggaagctaggttggattacagagtcagagaaggcctctcagagaaagtgacacttgccttgagacctataggattattaggagctggctagacagagggagcagtagatcctaagctctgacatgagaacagtttggtgagttcaggagcccagagcaggccgctgtgactggaattgactgagggatgagctcctgaagggccagaacttgcaggccttccagggctctagtgggaagtttaggttttgtcctcacttatggagggttatttcctcttatgctttgtaattctggaaagtgcagattgtttgagaatcacatccagtggagctgtgtgagaatcctgggcagcagaggttttgagttgaggatagaagcctctatgtaacaggtttggtgtttgcttctactaaagatacatcctctgtttgggagggagaggcagacaaggctggggagagggagagtgccagtgttgggaaagaagagaaaaaaatgtagaaaaggaataggagagaggatagggatcgggttggagataggtcagagatgggtttgggaatgggaatagagaggctgggcttcatcgtgtgtcttgttttctcggtgataggggcctcgcgtgcaggacaggaaacaatgagtacacagggtgccttctgaccagccctggggtccagcactagtcattttgtgccttagttaatgccttgacttcccgcacataccaggttgagagaggaacgtcccttagcaactgattggcctggagtctagaggactggtgggggtctggaaccagctgcccaaggaaaacgattctcccaatgtccgggggacgcagtagcaactgttgcttctgactagctcaggctctggagacccgcgcgctctcttatgcggctgcgcatcccagcagctcccgcgagaagggtcaggccctgattggctctggacaaacccgcgcgagcttgcggggcggggcttcaagggattggtatccccgtgcaaggaggttggcgaggcctcaggggactcccagttcagcgaatccgttagccttcctctgccttagtcacttccccgtgaggcactccgtgtttgtgtacacggttattccacgtgtcagtcagttcatcgggcgcatccggagtcattgaaaacagtaataggaagtcaaacaaacccgcttgatgcaaaaattcaggaggacattcggtttttaaggaaatagtgctgaggaaggaccaggctggagctccttggaccctgagactgggaggtaaatatggaaaaagaagtgataatttagggggagggaaaagagatcacctgtgaagaaaactcacgcacacaccagggcctggagaaggaagtgagactggaaagagatcagaattttatttttatttcattattttattcatctatttaatttgagacagtgtcttgctctgtcacccaggctggagttcagtggcacaatctcagctcactgcagcctcgacctcccaggctcaagcagtcctcccacctcagcttccagagtagctgcacccacaatgccgggctaattttttaaattgttttgtagagacagggtgtcgctgtgttgcccaggctggtctcaaacttctgggctcaagcgatcctcccacctcagcctcccaaagtgctgggattacagatgtgagagatcagagtttttgaatctgaaggacccttacatagtctgcagtaaccctcccattctaccgaggaggaaaaagagggggaagcagaaaggggacagaacttgcccagagctatccaacgagttactggcaaagccccagttggaaccagcccagagctcttcccaacctttgattcgaggttgtaaattaaaggaggaggaggaaggattttgatagtgaaaaaaaagcaaaagtgggttatgatgcagagataggatttgttatctggaagcctgagtagcatcttgatgtaaggagggagtcgtttttttaagagaggcagcgatcagaatggaaaagcagagggctggttcttgaatcaaaacatcactgagaaaagagatgagtcaagagcggtcacaaattaaatgctgagggaaccaggcaggtgatgtgaatgataaacagttgcctagcacttattttgtgctggcctctgttctgagggttttacatgcattcattcatttaatcatttaatgctcccaacaattctgtcagatgaatcctgttaaaatctacatgttataagtgaggaaacgggaaacccagagaggggaagtaatttgcccacagtcacacagctggcaaatggtggcgccagacttaaactcaggcaggctgactcagcacacggtcttaaccactgtgttatatgcccctcccaggtgagtgcagcagggagagcaggggcagcaatggactggagaacaattgtccaatattaaaggggaaagttaatatctgccatgtgttgtcagatctaatttattaaaaagtagctgggagttcagacttttatgtgaggatcctgatttttaaacattgcaactaatgaaagaaagtctgtatgcagttttcttaatgcaggctaaataaaaccccctgcattttaactacctcacaaagccactaatttgcaaactctagactatcttaaatgaggaagcagttccctagtgagggaagggcctggcccagaaaaacctagaaaatgggaggcaaagaccaagcctttggactgctggccgtccactcacagaagaatctagaacccttcctttgaactggcttcacatccaagttgtatgggtttcctgttgctttcataagaattaccacaacttggccgggcgcggtggctcacgcctgtaatcccagcactttgggaggccgaggcgggcggatcacgaggtcaggagatcgagaccatcccggctaaaaacggtgaaaccccgtctctactaaaaatacaaaaaattagccgggcgtagtggcgggcgcctgtagtcccagctacttgggaggctgaggcaggagaatggcgtgaacccgggaggcggagcttgcagtgagccgagatcccgccactgcactccagcctgggcgacagagcgagactccgtctcaaaaaaaaaaaaaagaattaccacaactttagcagcttttttgttgtttgttttgagaccaagtctcactgtgtcacccagactggagtgcagtggtgcaatctcggctcgctgcaacctctgtctcctgggttcaagctattctcattcctcagcctcccaagtaccaccacacctggataattttctaaaaatatttttagtagagacagggttttgccatgttgcccaggctggcctggaactcctggcctcatgtgatccacctgccttggccttccaaagtgctgggattataggcatgagccactgggcccagcccaattttagcagcttttaaagtaacactcatgtatgatctcacagaaggtcaaaagttctggtgtggcgtggttcccctggttttctgctccagctttcacaaggcctgaatcacagtgttggcagggctatgttgctttctcgagtccctttggatgaacccatttccaaacacattcagaatcagttccatgctttgtagtagtgaggtctgcattcccttgctagctgtctgctggggtcattgtcagcttctaggagctgccctcatgggctcgtgggttcgttccttcatcttcaaagcaaacaatggtgagtcaaatccttcgtatgcttcacatctctctgacctccacttctggctcatgtatgccctttctttctcctgaatctctctgacttttctgctttgcaagtttcacgtgattacattacattcactcagatagtgcaggatgatctcctcaatttaagatcagcagattagtcaccttcactctatcagcaaagtcccttcactcagtcagcaaagtcccttcactgaagcacgtagattaatgtttaattgaataaccagggcacaggaatcttggaatgggagacatctttagaattttgcctaccacacaagtcgagggggaagacatttgtaactcatatggtgcaaaactatatgcttttcccactgtctttctcaaaccttgtgaggtggacaggacagtttgatttattcccatattttatacatgaagcatgggactcagagaggagaagaggcttcaaccgtgatgacacagcagttctgaaggcagcctggcataccggaaagaacactgggttcggagtccagggacctacattatgacttcaggatgtccatttcttggccctgtgaacctgactagttcctatgctgttctgggcctcagtttccttatctgcgaagtgatgcattgagaactacatcacagtgctgttgtgagattgagaatgataaagtatgtgaatctccagtgcacagcacatgggccaccatgattgttcggtattatttatttatttattttaaggtatctgcagagccacagctagaacccagatttatttatttatttatttatctctctctctttctctccctttctctctctctctctctgtctgtctcccaggctggaatgcagtggcacaatctctgctcactgcagcctctgcctcctgggttcaagtgattctcataactcagcctcctgagcagttgggactacaggcgcatgccaccacgcctggctaatttttgctttttaagtagagaagggattttgccatgttggctaggctggtctcgaactcctggcctcaagtgagctgcccgccttggcctcccaaagtgctgggattacaggtgtgagtccccgcgccttgccaaaaccccaaatttcttggttccaaatcttctttcatttgataaagctttattatgcaccagctgtgttccagattgtgtgttgggtactagagacacaaaagtgactcagacttgactttgaaaggtggactccattatgtcacataaaggtaccttgggcatgacacacaaaggccacccagaagtggtacacaaaggtgattccaacatgacacacaaaagatatttggacatgactaattttctcaaggaactcacattctggtcagaatagatacagagttacttccctgcgtactgtgaaggggcagaagctgaccaaggagagaaagagaaacagaggggaagtagggttaggtagtatttctagcagtctgccaaaatctgtcaaattttggagtttattttgacagtaaagtgaagccaacagatggtaacgaacagggaactgacatgattgatttataatttaaaaggatgccatgcagatgtggaaatgtgaaggggcaatggtggaaatatcactggaacaatggagtaatggaaattccactgtccttcctcagctgcagagccccctgcagagtctccttgtcatcttcctccaaaagttttctaggagtccccaaggagtctcctatgtcttcacaaacaggccccattcatctggtacctgcaagcatggaagctttactttttttttatggtggggatggagtcttgctctgtcacccaggctggagcgcagtggcgcgatcttggctcactgcaacctctgcctccccagttcaagcaattctcccacctcagcctcccgagtaactgggactacaggcatgtgccatcacacctggctaatttttgtacttttagtagagatggggtttctccatgttgcccaggctggcctcaaactcctaggctccagcaatctgcccgtctcggcctcccaaaatgctgggattccaggcgtgagccaccacgcctggcctaggagttcacttttggctagattccctggtaaggcattttatcagtttcccaactagcgtgacaatcaaatggagaagagatatggcagtgggctgtgtggggttgttacaatagctccacagggtcatcagaaaaccaggctccccatgttgttgtcagtgacatccccagatctctagctttcattctcacagttgtctcatagtcgccaggtggctgcaccatctccagcatcacgttcatcttccaggaagtaagaagaggaaggtgaggaggaggaaatgatggtgctagtgtcagaaaagcagaactcccaaaactctccagcagatagcctcttaagtttggtatttttaagtagacaagtctctcaaaatgtgcgctcagtaatctagtggagttaaagatttcttttatttatttatttatttatttatttatttatttatttatttatttttgagatggagtttcactcttgttgcccaggctggagtgcaatggtgcaatctcagctcactgcaacctccgcctcccgggttcaagcgattcttctgcctcagcctccccagtagctgggattacaggcgcgcctgccactacaccctctatatatatatttgtatttttagtagagacggggtttcaccaggctgatctcaaactcctgacctcaggtgatccacctgcctcagccttccaaagtgctgggattacgggcatgagccaccacgcctggccaggtttttatttttatttttttgcattgttcatgagaaagaagagtacggtcctacagattggtatacaatttaggaaaacagagatgtcaattacaatgttattattaccagagcaagaaatcatcaaataagacaacccgtcagaattccattttatttggggatcattttcataagacatggaataatttctaacatctttgtagtctcataagaccatttggtttaaattattcttccaagagcagattcgtattaccaaagactagaacaagtcagcaaccgtcatgaatattcatacaaaactgtatattgcagaggagaacataaatgatattcttataaacagtctcagttttgcacaacatcaaatcaaattccttgaaccattttataacacagaacaatatcttttgatttattgctgcaggggcaggaaacgtgtccttcaactctttctgagagtcatgtactttattatgaaaatttatgtttttaaaaccaagtcctggaattttattagctagtattacatgaaaaaaaaaaaaaacccttgggagctcagttgggatggcaaaaaaaaaagggagaaaagctgaataggcttttattcactgatagtaatttgataacatttttcttctccttggctcactggccagaactctgccatatggccaccctagatgaaaatgaaacaagaaaatagagattttatttttcagattggtggcttgatcacctggacaaatttgaaataacaaggaggaaacagaggttgaatatcaggtaggcaactctcagggtctacctgagatattgccctagaggagatggatagctagggctgctgaagacagtctgagagaggaggcttctttctggttgtgagatccaggagagaacttccaggaggaggttacatttgacctggacttggagagagaaggagggtttgaatgtgggcaaaggacagagctgcagaaggacgccatgacacggggagtggcctgagtaaacaggcggaggaaggatgtgcggagcatctgtagaaaggatccccatttcagccggtgcattggctcccgcctgtaatcccagcactttgggaggccaaggtgggcagatcacccaaggttaggagtttgagaccagcctggccaccatggcgaaaccctgtctctaccaaaaatacaaaaattagctgggcgtgctggcaggcacctttagccccagctactcaggaggctgaggcaggagaattgcttgaacccgggaggcagaggttgcggtgagctgagatcgcgccactgcactccagcctgggtgacagagcaagactctgtctcaaaaaagaaagaatgacagggtgcaggcatgggggctatcgaggtaagggaaaagcggggcaaaatcagggagagctcgaatgaaaggcaagggagtttggaatgtatcctatcagccgctgaaatattgtttatttctcaaatatctctcttaaatatatcaccttctctttgtcccccatagctattgttgcagctcagacttcatcctctttctcctggactgttgcttcctcctcactgcagacccagaggaacctttcgaacacccaaacccgttctcccatggttcaaaaccattccataatttccatgacttcccccattgacgtgggagggagtccgagctcctcagcttggcatttgaggctctttgaagaggtaatggagtgggaatgcagactagagacaggaaagcagacatggtgttgaggcttcacaaagagcgtgcggacaacccctgttcttttgtttctgaggcagggtctcgctctgttgcccaggctggagtacagtgttgtgaccacagctcactacagcctcaacctcccaggcacaagagatcctcccacctcagcttcctgagtagctggaactacaggcatgtaccattacacccgactaattttttttaacattttgtagggagagggtctccctacattgcccaggctggtctcaaactcttgggctcagcctctcaaaatgctgggattacaggtgtgagccactgcgcccagcccaaactctgttcttgaagctccccagcatctggtcccatcaggcccctaattcacaagattcgcagaccttaggggtggattgaaaagacaagagcccctagcaagcagtggacttctttctagcctcaccccatgcttcttactgctgcccctctcctcatccattccaaatcctgccctccaggacagaccaatctgaggtcagagttagcagcaggatacatcctggtcctctcttgcccctgagatctcgctggggctgatggcactgccactgctatggttgggtaagtagaaggagaggcagcatggaggtgtcttggggaggtaagggtgggtggagttggaaggcagacagggctgaggtaagatgaaggctgaggtaagatgaagtacctaaaaaattaggtacttggccaagcacagtggctcatgcctgtaatcccagcatgctgggaggccaagttgggcagatctcctgaggtcaggagttggataccagcctggccaacatggtgaaaccctgtctctactaaaagtagaaaaattagccaggtgtggtggtgggcacctgtaatcccagctactggggaggctgagttgggagaatcacttgaacccaggagtgggtgttgcagtgagccaagatcgtgccactgcacttcaccctgggtgacagcaagactctgtctaaaaaagaaaaaaaaagtagaatctttattctacaatatagatcctcaaaaaaccctcagtctttgaagaccagagttcaggttcaagctctaccaccttgagtaattctcttcagtttgctcacctagacaatggggtgttccccttctacagagcaaaaggaaatttatttgtggaaaccattcaaccacaacaatcctagctttcacaaggctgttggggaggggagggagttccaaatgagctaatgggtggtgagcacaattattcactaacggttcactatgacatggtctcttgtaatgtaatgtgactgaagtcaaaatctgcagttattacagagggccatgtgcctctgtagttatggtccttaattatcacaatactgtagcattggtattatcgtacccacttctctgattgagaaactgagattcagaaatgatacaacatgacccagatcacaagatacggttaataccaacaagaagagcaataaaaaatccagcagactagattggggtggtgcagtttaggagtccccccaagatgcctctgattcagtgatccacaagaaggactcaaaactcagcagaactgttttactcatgattgcagttgattatagcaaaagagtacagatgaaaatcagtacagggaagaggtgcatagggcagggtccaggagagagcaggcatgagctttcagctgacctctcccagtggtgttgcaccaatagagcttacttctttctgcaacaatgtgtggtgacatgcacagacatgccaagtagagaagtgcacccaagccttggtgtccagggtttttattgtgggtctggtcactgacttagcttagtcttcagcccctccagaggtcaagctgatgccccaggatccagggctcccaccataaatcatagtgttagcatcaactgatgaagtccaaggtcccaggtaaacaaagacactcttatcaggcaggatatcccaagggtttagagatcacctcataggagttggacaagtgtcaagcctttcttaggtaaggtgactcttttaatgcacagatataatacaggagtatgctaggtgggtctgtttttcaacttggatctctccttacagggctactttctcatgttttgatggaagtcaagaagataccagtggaagaggggctgtgcactacaatcccttgtgcatttgaatttcccaaagaacccccaagcaattccatgatcatgcactactggctcaacaaaaacatcagctccctggtagctacaaataaacccaatgctaccattggtgataacaccaaggacaaattttacatgactgggaatcttgatgaagaagactgtaccctactcatccacgatatactcaaagggaacagcataatatatttattctacgcagatctaggagaacaaaaaagtgctttcctgggggagaatatcaaactttttgtgtcaggtgatgttcaatatcatccgataagtggtttggaaagaaggaaatccaaaagtggttctggtgattatgtggtttttacctgatgggcactgggctttacaaaaccttaggtatttgagttttataatgatgcaatgagatcagtataataggtaactttacttttccaaatagaaatggcaaagagagaagcgattcaccctatatcatccaaccagtacaaaatagagaggaaatgatcacagattgggctgggaaggggcagagtctaagggagaactgggctggaaaagggagacagagtaggagctaccactagcacatgtagtctaggactcaggtaaggggtcagaatgtagaatcctcattctacaatgtagagcctcagaaaactactcaccctcagtctttgaagaccagagttcaggttcaagctctacaaccttgagtagttctcttcagttttatcacctggacgctgggctgttccccttccacacagagaaaggaaatctatttgtgaaaaaccattaaaccacaacaatcccaggtttcacaaggcggttggggaggtgagggggttgcaaatgagctaatgggtggggagcactttgtaacctggaaacgttgtgcatcagtgaagtgtccatgagggtcccttttcccccaaggtttgggtctacttctctcttctccagagctaacccaaaagccagagctccacatgccagagattcttttggctgagaagactgtgaccttgaactgtaccctcaaaggcacctgcaaagaaaccaaagccctcttccactcccggaagaacccagccatctccagcagctcctcctcggtgctgcacttcaccctgaggcctgaggaccatggcaacacccttggatgtcacttgaacttatccctagccaacgtgaccagaagtagcttggtcaagctccaagtggtctgtgagtgctggtgggcacaggcaggatcctgagaaatagtgggctcaagaaaagacctgagccccagagggagagaagtcttaggagctgtcacatcttccccctttgggaagacctttggggctgaaaggccagaggtaggagctgagcccaagtctgaggcagatgtggagagaggatgaaaggggactgttttgagtcccagccccactctgggttgccagaaagtctttctgaagctccctgtgaatagcaagtaaagagaaggctgggtcttaggggaagtagagaagcaaagtcaggacatcttgatgatccctgattcttcctctgcacagcacctgccaggttgttcaattcctcttgttccttggagaagacagttctgtgcagctgttccttccacgggatccccacgccctccgtgcagtggtggatgggaggtgtccctgtggctgtgaacagcatggataacatcctccgggtgacttcttccacatgtgccccctgggccaacagcaccatcagcctcattggggagccagaaagagtcatgagacttcactgtgaggggaagaaccaatatggaattcacacttccagcatcttcctgataccaactgagtatccagggacctagtgactgagctggaaagaacacctaaagaccagatgcagatgggcacagggccggaggaaagggtagagagttttagctcagactttaaagcctttggagaaaggtgaatctcacttccctccaattccagataagaaatcagtttccagtgtgttcgtgaaaggattaatccagggcattgtatatggagccattgcattctcattgctcttcttctgcctcatcctcttgtcgtgagtatcaaagttcaaattcatcagcagcctttcccaaagcctactacctttatttatgttctccttttccttcctcatactttcttccaatttattttgctttgtctattttttttttttttttttgagacagggtctccctctctcacccaggctggagtacagtgggtcaatcacagctcactgtagcctccacctccctgggctcatatgatcctcccacctcagcctcctcagtagctgggactacaggtgtgtgccaccacgcctggctaatttttgtattttttgtagaaataggatttcaccatgctgcccaggcaagtttccaactcctgggctcaagtgattgacccacctcagcctcccaaagtgctgttgggattactaggtgtggcccactgcccctggccttgtctaccttttaaaaatggattcttatatcgttaactttcagctactcttctttttcagtatttgtatttagggctataagtttccctctaagcatgactttagctgcatctcacaaattttaatataaatatttcattatcatttggttaacatatttctaatttccattatgattttttgactcatgagtattttttgtttgtttgttttttggtttggtttggtttggtttggtttggtttggtttggtttggtttggttttgagacagagttttgttcttgttgcccaggctggagtacaatggtgcgatctcagctcaccacaacctctgcctcccaggttcaagtgattctcctgcctcagccaactaagtagctgggattacaggcttgcgccagcgcacccagctaaattttttgtatttttagtagcggcggggtttctccatgttggtcaggctggtcttgacctcccaacctcaggtgatcgcctgcctcagcctcccaaagtgctgggattacaggcgtgagccaccgcccctggcctgacccatgagtttcttaggcacattactctctttttaaatttttagcttaaaccgaataaggtcagaaaatatactatgcatgatttcaattccttattttctttgtaacacattttttgtctcgtttttataaatattccatgtgaacttgaaaagaatgtatattttatgcctgtcaaatgcagtatatatatctctctgtgtgtgtgtctgtgtgtgtgtacacaatcacatacatatacatatataccctttaaatcaaattcattattcatgttgtttaaatcttctctacttggactgacttaattgcctgcctgctctaatgataagagatatgtgtttctaatctcccacaatgattgtggatttgtttgtttcttcttgaaattctgtcagtttttgctttctaaatcttgaggccatgtcattagcttcaagtctattttaaaatgtgcatacaaggccgagcatggtggctcacacctgtaatcccagcactttgggaggccaaggcaggtggatcacttgaggtcaggagtttgagaccagcctggccaacatggtgaaacctcgtctatactaaaaataaaaaattagccgggcatggtggcttgtgcctgtaatcccagctacttgggagattgaggcaggagaatggcttgaacccaggaagcggaggctgcagtgagccgagatcatgctgctgcactccagcctgggcaagagagtgagagactctgtcccccaaaaaaaaaaagtgcatacaagtatcttccttatatcagataccatttttcttcttcacctttgtattaaagcctattctgtcagatattagtatagctccaccagctccttcttttacatctactctcaatctgtgatctgaaggtttagttatgtgtttcataatcagcatatgattttgactttttttagtcttgtaatttttaaattggatttaaattaatttgcttgatgtaattactggtgcatttaaatactgatggtatttcaatataccatcctagtttgtcccatatgtttctttttttccctttacttgtcttcatttggattggctgggtatttttatcaatccattcttttctttctactagttgaaaattatgcaattatatgttttttaaatattcttttactggttacccagaaatcaccacatctatacttcagttatcaaagtatatatttgataatttcaaagtataaaacctttaccctcctccagataacataaagaccttagaacagttgaactctagttttcctcctcacaacttacatgctatttttataacatgctttgtggcattttatcaattccaatatacatgttatttcacattcgaacatctctgaaatagagatatgtcttcaaccgatggtgatttacagttgctgttggtctcaggtggcagtcctgataaagttgtcattgcctgcaggtgcctgaactcttgtcattgctgttcatattatcactgtaattgaattatttgttcattgatacatgtttaatttattgccttttcaaacatttgcaaaagtattacattattagctgccactgaaacaaagttatggtgtatacagaagggcacagaagtaaaagagtaagcataccttccattctgtgacacctgtaacatttgtttgagaaatgaccagaattccatattttttgtaaagcaacaatctggtgctttatagaacctaggaaagagagatacccacatgtggatgaagccatgttactttttcttgtaagataaaaagcaaaagggtaatttatctcataaactgtcaatgcaaatgaaaccagaaggaattgcttaatccttcggaagacatttttaaaatttaaattaacatgacattggatgattcatgtgctgttcaggactatgttagttcttaatagtttaactggcaacatttttttcccttagtgatatataaattatgcatcttactattaatggcattttattattaatgaaataccaattctatatttttgagcccccaaagacgtcatcatcatctttggttttatttcgtacattcactgctcattttgatttacatatatatttaccatagtctctattctttattccttacattctgttagtattctcagatcttccatccagaatcttttttcctgaaatatattctagaaagctgtttagaattggttttctggtagcaaacattcttggttttttctctcactttctctctctctctctctctctctctctacccgccccccgactctctctccctctcccttcatagttgaaagatattttggccagatgtggtggctcatgtctgtaatcccagcactttgggaggccaaggtgggtggatcacttgaggccagaagttttagaccagccaggccaacatggtgaaaccctgtctctactgaaaatacaaaaaacaaaaatagccagatttggtagtgtccacctgtaatcccagctactcgagaggctgaggcaggagaatcgcctgaaccctggaggcagaggctgcagtgagctgagattgtgccactgcactccagtctggaccacagagtgagactctgtctcaaaaaaaaaaaaaggtatatttgccaagtttggaatgctgcatcggcaggcattttctttcagtatcttgaactattccatgttccattatatcttgcttctattatcacaggagaaaagtcagccatgactctcatctgctgctcctttgaaaatgatctctccttatctgtctctgcctttaagacctctttgtctctgacatttccggtttggcctcacactttacactttcataacaccaacttgcctatttgtctgtgacacatgcgtttcttgtcctgcagctttgctgatatgtggcttctgcccaatactccccctcctctgcatttcattttctacccctgctcccctctcacacctggctgacatttactcatcatttaggactcaacctacagcccctccatcacatgctctggaaaacttccccgggcctctctccggggccaggtgtcttttcaggactcctgtaggtctcctggacttttgggtattagcactaacacttttactttgatgtgactgagtgtggatatcatttttttagatttgtctttatttatatttatttggcctcttcaatctatgctttggtgtctttcatcagttctggaaagattcttaaccactgtttatattgcctctgctctttgttttcatcatagggctctcatctaatgtttgtcaaacttttttatctgtttcccttcttaccctgtgtcctgtattttccagagagagggagtcaagtaaacaagtactaggttagaggtctgtatgagggagttgctaagagaaccctactctttcactgtctctccatccttggggcagaggtaggggatcagtattgcccagaaaatcctttagcttgcctctaatcaactccctccaacttcacactctgtcagtatgccaggtgtttccctctttcccccagtctcttatctcatcccgtcatgttcagcaataaggtttacctacttccaaggaaaaaatcagctccccaacacatacaacgttattaccattgacattgagtgatgtactccctgccttttttagggaaagaggctttcttcctcctgtccaaggtaagctccaccttctctgcttgggaatccttctcctccactgccttaggagctgtactccatcaatcatcccttctggctcctaaattttcaatcattctttctttgctggcacaaatctctcccgcctcagccccacaggcttcctctatgtactatccaatattctttcgagaaagtatcttacaccacttcctgattctcatcactcttccacttgctccccagcaccaggccactgacatgacattgtctaaagcaaccagttatccttattctcaatgttattctcaaaatccagtggcaggtgttctttctcttgttcacctttaggcagcatttaggattggggttggtggggtgaggatctcccacccagtggcttattttcatagcaaggaaagcatggcaaggctgtctgctgaaaatgacatgggtgggagcatggggaatccatggggaattgagaagaagtgtgatgtgttagggtggttggaatagccactggggagaatgagcaggatctgtataaggacaaggagagcaaccactgagcagtagccaaggcccattggttactggagattagtaatcgttaatggtggcaagcatcattgctatgtgacatctcctcccagcagcagtcattggaagacgtcttagtccattcagcctgctataacagaatacatagactgggtggcttataaacaaaagaaatttacttctcccagttctgaaggctgggaagttcaggatcaagtcaccagaagatttggtgtctggtgagggcctgcttcttggttcacagatggcaccttctggttgtgtcctcacatggtgtacagggaaagggagttatctgggctccctttataaaggcactacaatcccattcatgagggctacacactcccgacctaatcactccccaaaggccccagctccaaatactaaaacactggagattatgtttcagcagaagaattttggaggaacacaaatattcagactatagcagaaaaaaaggagtagatgatggcattggtctaggtttgagtattcatggacaagatgccaggaagggtgatggagtggggaggttggagacgggcaagcaaggaggctggaaggagaaagagagcgctttaactggggagccgttgtacctagtggggtggggagggaggaaaggaagagaaacagagagtcttcatagactctagaaaatatagtgtcttggaattgaagcttccacctgtgatatcatataatgggaacagttggaaggggagcaccaaaaaactggatggatagaagaactaggcagatcatgaggtattggaatttacattttcataagtggaaaagttttgggagataatgaacccttggtagttaaaggaaacagttgcattcatcaggtctcttccagttgtgagttataagggctgaattcaacaagctcaaagagaaagggaacagttctggtcatctgttgctatgtctctacccctgtcttagtccatctgggctactacaacacaatgccatagattgggtgttttgtgcgtaacagagatttatttctctcagttctggaagctaggaagtccaaggtcagggtgccagcaggttcagtgtctggtgagggctcttttccttatagatgacatcttctcactgtgtccccacttggtggaagggactggggtctcgctgaggtctcttttataaaggcttttgtctcattcaggagggttccatcctcatgaactaatcacctcccaaaggccccacctccaaatacgatcacttgagggttaggatttcaacatgtgaatttgagcggggggtgtaaacattcagatcatagcaatcccccaaaatacagtggcttcaaacaataatcattttagtatttttcatgatttcctagattaggaatttgggcagggcccagctgggtgattcttttgctccctgtggtgtcactggaggtcacttgagttgggctagcatggagaatccaaaatgctttcattcacaaaccaggcattttggtgtggatggccagaaggtgaggctcagctgggcccctctttctttccatgtgggctccgagtctctccatgtgctctcttccaaagcagaagctgccagtcctcttaaaggacaggcccagaatcaatagcacatcacttccacagcattctcttagagcaagtcacaggctggccaagattcaaaggaagaagaaatagattccacctgtccttaggaaaactatccaaggatttgccaccatttttaatctgctgtaggaacagattgactgttaagtctaaaggcacgtattagtttgcaggcgctgccataacaaaataccacagactaagtggcttaaacaacagaaatttgaggctgggcacggtggctcacgcctgtaatcccagcactttgggaggccgaggcaggctgatcatctgaggtcaggagtttgagaccagcctgaccaacatggagaaaccccatctctactaaaaatacaaaattagctgggtgtggtggcgcatgcctgtagtcccagctactcgggaggctgaagcaggagaatcacttgaacctgggaggcggaggttgcagtgagctgagatcatgccattgcactccagcctgggcaacaagggcaaaactccgtctcaaaaaacaaacaaacaaacaaaaacggaagtttgtcctcccagcattctggaggctgggagtccatgatcaaggtgtcagcagtgttggtttctcctgaggcctctctcctcactctcttactgcctcttctcatggtcatacctctgtgcacacacccctcggtctctccctcttcatgtaaggtgctatggtctgaatgtctgtatgcccctacccctgctaattcatttgttggaatcctaacccccaagatgatggtgtttggaggtggggccttgggaggtgattaggtcataaaggtggagtcctcatgaataggattagcgccctaatagaagagcccccagagagccatctcctccctttcaccacatgaggacccagctagaatttgctatccatgaaccaggaagcaagccttgcccagacgtcaaatataccagtgctgtgatcttgggctttacagcctctagaagtataagaaataaatttctgttgcttataagccacccagtctatggcaccttgtgatagcagcatggacagactaagaaataaggacaccagtcatataggattaaggccccacctgaacagccttcatttaacttgaggcgctatttccaaaaacagtcgcatagactatggcccacccataatgatctcatttaaccttaataaccccttaaaaggccctatctccaaacatggttacattctgagctactgggggttgagacttcaacatatatatttgtggggacacaattccacccgtgacaggcggatctacacttcaggcatgtctgaatccaggcatgcagatggcttcaccaagagtctgtctgtccccaccctatggctctgtttccttctggttaacgtgagctctggaggctctcttcaccttacaggcaagatggccagccccagattcacgtcctcctctcttagctaactccagctgacagagaacttgtcttctcgtggtgatttagcaatcccagggaagactgattggctctacctgagtcaagggtcgatgccacctctaacagcccatcccagctggctcccccaggaagggattccagccaccaccaacaaaaaggaactggcctcagaagctctgggagctgacatgtcggggtgacaattgggtctgtccatgggaatgtcaaaggcgcccaaaatgatgacagaaatctggggacagaaagactgagagtcaagcataaaaatcctctgggaatacagaggcctggcctagggggttgccagtgacagaaatgagaggaaggggatgttctggcccaatagccagaggctcaaagtagcagaaggagactctttcttcagaggatgagggttctaaaacagaagggtaacttcctgacgttgccatggcatctgtaacctgtcatggtgctggtgggggtgtagcagtgaggacgaccagaggtcactcttgtcgccatcttggttttggtgggttttggccagcttctttactgcaagctgttttatcagcaaggtctttatgacctgtattttgtgccgacctcctatctcatcctgtgacttagaatgccttcactgtccaggaatgcagcccagtaggtctcagccttattttacccagcccctgttcaagatggagttactctggttcaaatacctctgacaatatcgtagagcaaaccaggcctcagggaggtggacactgaacgaggacatatgcagatgtgtagggacaaatgttgggaagtgcctggaggaaaacggggagctgggagagagtgtggcaaggggacggggcggggagcagccttcaggtacttgctctgaggcctaaaggagtgtggggagctgcccagactgagggagccgcagttctaggctctgagattgcaaaggtttatcgagttcaagagcccagcagggccagatgagctcagagcttaaggagagcttgggagaggctaacctgctggcagagcctcaagggctctggtgagaagtttgggtttcatcttccctcgtggagggctattgcctctcatgcttggtcatcctggaaggtgagctgctctcagtggggactttacctgcaagaagcatatgcggacaatgtggtgggcaagtccccctgaaatgagttttgtgtgagttgcccaacagcgaaacacaccgggggctatttgtgttcattgctcactttgtcgctctctgatgcaaatctctataaatggaggcctcagcttctaagataaatacaaaaaggtttttttttgccaccgaaagcccaggccaaaatagacatgcttccttgtcattcccttgatcaatgactagattttttttctggcgccccccttgatgtgggggtgtcatatccaggttgctacctagtatggacccaaggccttgttgtctgctgtcactggaccatttaaagcaagtcccttggtaatcataacagcaagcccccgcttccccacaacccagcagtgtgcagccaaccctcagttgatgcgtggcctctgatcttcagtccccaacgtccttacgacctcagccccatcagtattttcggatgtttttgtagagcaagtgttttcagacaggaaatggacgtttgaatcttattgtctgaacgcagaaagaaacaatggaaggatctccatttggggaggaacaggtcgggtctttaaagcttgctcaggctgctctgcaggggacacgggacagaaggacacagccgccagccagggaccagcaggtggcccctgcagctgccagagcaagaaaggaaagggaacagttatataatccatgggacagccatacaacagaacaacacagctgtcagaaagagcaaggcgatgtgccgggcatggacatgcagacatgagccagcaatattcgaaggaggaagaaaggtgcaaaaaaaaagacctgtccaaaactgaaaagtatatatggagacatcgcagagcagcaagagaagcaggaatggaccagacacgaagggccaccaggctgaagggctgggctgtgtcctggggggactgggaagccatgggagggctgtgagcaggagaggagccgggcagctctgggggacagagtgaattccaggaggcccagaaagaagcttgggagagggtccacgccaagacaatagaggttcttatccccatttgacggcgtggggtggggctgtgctggtctcagaaccaggaagcggaggaagctggtgttctgggcccagcccagggctccttctgggaactggacggggcagggactgagcacagcattcaccacggggcttcctgccttagaatgaagatgcttacctggtgggaggagcatcagagtcccaaggccaaagaaggcttgccccttaagaaaccagagctgctggaggaaacagaagtacccaaaatgcctgaagctgacaccccaccagaccgggctggaggtaagtccctgggacagtcacaggcagactgtcaagcaacagggccgcaggccagggcccccaccccatcacctggcagaaccccggggaggcacttgttcaggacggagagacccaggccccctcgccccacacagcagatgctacatttgccaaaacaaagccccacagactgggcggcttgaacggcagatactgattttctccccctctggaggctggaaatcccaggtcaaggtgccagcagcagagcttccttctgaggcctctcaccttggccggtagatgctgtcttctccctgtgtcctcacagggtcatccctctgcgtgtgcctgggtcctaatttccttcccttgtaaggacaccagtcattgaattcaggcccatcatgtgacatcacttaaccttaatcaccgatgttaagaccttgtctccaatacagtcacattctgagtcactgggggttaggatgtcaacatatgaatgatggggggtggggtggatccacacttccgctcataacagaggcttaaggaggctgcttggattcccccgtgttgggtacttagagaggggattgggcttgtctaaggcagcggagcaaccgactgtggttctcccaaagtctagggctctggagagaaagaagagtgtagactccgagatggatcacggcatgcggcccaggacgtggaaacctggcccaggcagaggtgcgactccatcccagactccagacccagaggccgtcgcccggctctcacccatttcctggggaaacatgccccggggcctccccagcgccagccctcatgttagccaatgtaggggacacgcctaacacctgacacctgcccaagggacacgccaccccagcagccaggctgacaggagcagaaacaaaacacacagggatacgccaggcgggcagcaccaggaaacaggctgctgccgccacaggggccgctgtgagcccagaatggatccaacccagcctcagccttcttcagagagagaaactgaagcatgctcagcacgatgggaagtggctgaaaccctgaagaacccccaagagcacatccacggagacactgggaaccatgaggccccagcctctgcacatctgcattgcaaacagggaaactgaggctcaccgtgcctcgggccacactgcaaggctgtgcactgctcaggactccggaacccgggacccttgtcccccgctgcagcagctgaccctgtcctggacattttctcctgactttatgagactctagtgcagaggttgcaaactcagatgctcacagccaccaggcagggaacaagaggggcacagttggcctaatgggggccgtgtctgtcttgaaagcagctgcccctcctgaaggcggcggctcacagtggcggaactccctccgactcctccccaccccctccccacaggtcaggaacacggggagactacagctagctcttcatatttttttttgtttgtcttttgaggagaatccagagatctcgatttcagtgtgaaatatcttgattccggcacattagcaattgagaacatgtttttaaaaggcagcgccgcgtgggtcaaagaaaaaccctgatgagccttctcatttgcaaactcagatcagaggcatagatgtggaggggactcctgctccctgaacacccttcctgcccacagcaggcggggttattcagaacgcagacgctttgccaagggcaacaagaatccccaggttctgggaggaagcttgtgtgtggaagagtaaggagggatttctaggtagagaaaaacattccaggtgttcactcatgtcactcatgtggccacaaatccccggaggcctcctgtgtgccaggccgcgggctggggacaaagagaagtcagacccaggtcctgcccataagacctccaggttgttacacccttcgagcagggccagggctgtgtcccaagaagcatggggagaggggaggggaggaggagctggcattgagggagggagggcttgacccggctcggggagctgagtgttgctacctgagcccagcaggcatgcagggagaggtgacagcaccgccaggcacagaaagctgcaagattgaaggcaggaggcatggtgctggggggtcagagcactccagcaagggcagagcaagcagcatttctagggcaggaggcagacaatggtgagaactgagccaggcaaggggccacaggctgcgcctgggtaaagctccctgcaaacaggcctcaactgtcgccccgctcaccctcaggagaaacaagggaggagctgatacctgggggatcagcttccccctctctctgaaggacatgcacagtggtgacaatgtccctgagtttgacttcagtcctgatcccccaccaattgaaaggtcgtggggactaggagggtgacttcaggaaaaatgtggcatccatatgggtgggctgagggatgagcgcagcaggggcccagcagctccacagatacaggtgagattggaaagtggaatcatctcccaagaagtggatattgggctgaactctttccccagagtcaagggaaagacacaagagggcactccaggtcagacagacagatggggtctaataccaggctgtgtttccccgtctaggctgaggtcactgccggctcctcaagattccctgtagggaccagagggggctgagtccatggagcaaaccgctaattggccagtggtcagttgtgtgcatttgtacatctacaaggagaggatccaaggaggaggccatggcaggtggctctgtacaaacctctgttccctcaggagatgacggaagcagccgtgatcactgtcctggccaggactgagggtgacccaagccctcacaggccttcattcacttaagccagagaccctgtggaatcggtcccattatcatgcccattttacagaggaggaaactgaggcccagagaggctcagaagcctccctgaggttacgttcctaccttctgagacagatgctatccccctgcccttacccacaaggaagttgaagttcacaaaggggaggtccttccagaatctcacagcctggggacaaagccagatttgagatggccctgccctctcctgcctgctcctaggagcaaggcccatcaggatcacatcaggctcacttctccccattccagagtgcagactgtggaagggaactgtctggggccctgcagccacttcaggctttgctggctccaggagcaggtctaggctctccctcccattgaccctcaaagtctagtctctctgtctctgtttctctctctctctcaattccatgcactctctgtgtgccctgtaccctgctaaatttggagaatggctgtggatagggctgccaccatcccttcctctcccagatgcggattcccccaaccatgggacactgcagggtgggggggtccgtgggatcatgaacttcttctgcagtggccacttggacaacagagctgagccacctgtgtttacatcccagctctggccctgagtgtgggccactcccatgttccctaaccccagctttcacctgcaaaatgggggtatagcataccgtggatcactgtgaggcacagaggagttcatgtttattcaggaaccagctcggggttaagggcacggtgacggcagcctgtgtctgttgcacactgtgtctgtgccaggccatgttctaagcacattacatgggtcctcttgtttatatccatcagggttccaccagggaaacagaacgagtagctgatccttatacaaaggcttattgcatgggagtggcttatgtgattctgagagctggctaggcaggtgctatggactggatgtctgtgtctcgccaacatttttaagttgaaacttaacccccactatgatgcggtctggaggcctcggtgtggactgctacaacaaaataccatagactgagtggcttataaacacaagaaattcatttctcacagttcgggaagctgggaagtctaagacttcttatttcttctcctgggcaacctccattctgctcttaaggcctttttgggatgtgattaggttatgtaggtggaactttcatgaatgggattcatgccctaagatggccgggcatggtggttcatgcctgtaatcccggcactttgggaggctgaggcaggaggataactttagctcaggagtttgagaccagtatgggcaacctggcgaaaccccatctctactaaaactacaaaaattagccaggcatggtggcacatgcgtttggtcccagctactcggaggatgaggcaggaggatcacttgagcctgggaggtggaggttgtgccactgcactccaacctaggtgacagagccaaaccctgccaaaaaaaaaaaaaagacctaagaggccagacgtttcctcttctaccatgtgaagacatagcataaggcactgtctgtgaaccaggatgccggccctcaccagacactgaacatgctggtgcctggatcttggacttcccagctcccagaactgtgagaattgaatttcttgtgtttataagccacccagtctgtggtattttgttgtagcagtccacaccgagtaagacagcaggtgtgaagtctgtagggcaggcaggcaggaggggcagtctggaaactccagcagcagctgaagcgaaattctttcttttcccgggaaacccccattctgcttttgaggcctttcaactgattgaatcagacccacctacattattgaggataatctccttcacttaaagtcaactgattagagcaaaaacaacaacaaaaaggtaactatgagacgtgacggatatgttaatttgcttgacagtagtaatcatctgattatgtatatatatatatatatcaaaacatcatgttgtataccttaaatgtatacagcatagtcaactgattagagacgtcagtcacagctacaaaatccttccacagcgacatgtctcagtgtttggttgagcagctggggtctgtaacacagccaggttggcacataaacagaccatcgcactgctggtccccaccatggccctgtgaggtgggttctgagattatccccatcctgtagaaaaggatgaggagactcagagaggataaggagcccgcctgactgaacaaacggccgagacacctgagccagggctgggaacgccccttcctcacccccccgcgccacgtcccatccaaccttgctcagggaatgcttcagctgctattattagcaccaagctcggctccagggacatggcacaaaaaagaaaagtacatctcaaagtgggtaaccatacctgaccttgtcctaggaaacagagagtcggggagggacgtctttgaagatgagaagagttcagtcaatgaaagggataggaactaatttattctctcaaaaatatactaagggccaggcgcggtggctcatgcctgtaatcccagcactttgggaggccggggtaggcggatcgcttgaagtcaacgtggtgaaaccttgtctctactaaaaatacaaaaagttagctagctgggtatggtggagtgcacctgtagccccagccactccggaggctgaggcaggagaattgcttgagcctgggaggtggaggttgcagtgagccaagatcgtgccactacactcaagcctgggtgacagagcaagactccctttaaatatatactgaggctggctatgatggtatgcacctgtagtcccagctactctggaagccaaggcaggaggattatttgaggccaggaatttgagaccaacctggacaacacagcaagacgccatctctacaaaaaataaaaataatagctgggcatggtggcatacacctatagtcccagctacttgggaggctgagacaagaggatagcttgaggccaagcacagtggctcacacctgtaatcccagcactttgggaagctgaggcaggaggatcacttgagcccaggagtttgaaaccagcctggggaatacagtgacaccccacctctataaaaagtttttaaaattagcatgcagccaggcgcagtggctcatgcctgtaatcccagcagcactttgggagtccgaggtgggcagatcacctgaagtcaggagttcgagaccagcctggccaacatggcgaaaccccgtctctactaaaaatataaaaatcagcccggcgtggcagcgggcacctgtaatcccagctactcaggaagctgaggcaggaggatcgcttgaacctgggaggcagaggttgcagtgagccgagattgtgccactgcactccaacctgggtgacgagagtgaaactccatcatctcaaaaaaaaaaaaattaaaattttaaaaaagaattaattattttggaaagcctttgcatgaataaggcatgaatctttgaacacccctgagatttctaagcattgtgttcagtgggcttcaggccttgactcatgccctgcaaagccccctagcagaatggaacgctctccatgaataaagataaaagccaaagatggtgctaggtcagcgaggtcctggcctgaaaaagacagtcccctccagtgggatttcttaaacagactgtctaataaaggtacgatttgcagaggtgcgagcagtgttagggatgtagggatggtaaggatctcaggtgccagcaatgggaggagaagtttcctgccagattctgctgagtcctggaggaacaaagggaggaatggtatgaccgaggccttagtgagaactgggatcatggaagaggggctgctgatggcactgaggctcccaccttgggagcagcaggcagggaggaggggatcctccagccccttccagtattctgcctgtgcctccctttgaccaaacccacctcgaagttgaagggcaagggagcttgctgatggggtcagtagaggtcagcctcataggcagaggggatggaggagggatggtgtggtggactgaatgatggccctcagagacatcagtcctaacgcctggacctaatgcctgtgcatgctacctgataaggagaaagggtcattgcagatgtgatgaagttgaggctcttgagatgagattacccgggtttatccagctggtccctaaatgcaatcacaggtgtccttttctttctttattttttttattttttattttttattttttgaaacagggtctcactctgtcacccagactggagtgcaatggcaggatctcagctcactgcactgcaacctctgcctgggttcaaacgattctccagcttcagcctcccgtgtagctggaactacaggcacaagccacgcaatttgtcttttttgtagagacagggtttcaccatgttggccaagctggtctcgaactcctgggctccagctctcctcccacttaggcctcccaaagtgctgggattacaggtgtgagacacattgcccggctcacaggtatccttataagagggagtcaggccaggcacagtggctcatgcctgtaatctcaacactttgggtggcagaggcaggaggattgcttgagcctgggaggtcggggctgcagtgagctatgatcatgcatagctatatctctgtccattcaactaccatccagaccaagaagtaggacgtgcctactgcagaaggctcccttccacgtacctcctgctggatctccatgacatgtctcctcccggactctccccaaccagagtaattacaattctcacatctgttgccatggatcatttttgccaggtatgagacttcatataaatggaatcatacggtagtaatctcttgtatctggcacttttcactccacattatgcctgtgagtttccaccatgttttagcacgtatcaatagctcattccattttattaatgaatcgtattccatggtatgagtctatattaattcatttacacattcacctgttgctggatatttagctatcttcagtttgagacttgcataaatgaagctgcagtaaacattcatttgccagtctttgtggacatattgtttttatttctcatggataaataactggggtgaaattgctggatcataggagtgctcagctttagtagacactgacaaaacattccccaaagcaatcgtgcccatttacactcccaccaatgatacaagagagttccagcacttgttattgtcagtccttttcattttagtcattctggcagcagagtaagagtatctcctcatagttttgatttgatctccctgataacttatgctgaattctttttcatgtgattattattactattattttttggtctggagtcttgctctttcacccaggctggagtgcagtggcacaatcttggctcactgcagcctctgcctcccaggttcaagcgattctcctgcctcagcttcctgagttgctgggactacaggcacgtgccactacacctggctaatttttgtatttttagtagagacagagtttcaccatgttggcccagctggtctcaaactcctgacctcaggtgatccacccccttggccttccaaaatgctggaatgacaggtgtgagccactgcacctggcctgaatatcctttttttttttgtaaagtgcttgttcatgtcttttgcccattttaaaaatcaagatgtctcctttttgttgatttgtgagagttctttatatattctggatataagtttgttatcaagtgcacatatggcagatatcttctgtcatattctgaggatataggaagaaaactaaagttttcggctcactgcaacctctgcctcctgggttcaaacgattctcccccttcagcctccctagtgcctgggattacaggtgtgcgccaccacacctggctaatttttgtatctttagtagagatggaatttcgccatgttggccaggctggtcttgaactcctggcttcaagtgatccgcccaccttgggctcccaaagtgctgggtagagctgccaggccctcagcaggtgcaccaccctccaggaacctccatgtgttcagctatccagaagctctctgaacccagtccctttgggtttttaaggaggcttcattacagaggcatggctaattaaagcattggcctctggtgatgaactcaaccttcagcccctccctccttccgagaaattgggaggtgggctgaaagtcccaaccctataatcctgccttgacctttcttgtgaccagaccctatcctgaagctaccagccattagtcaattaattagcatacagaagacatcgctttggaggttccaagcatttaggagttgtatgtcaggaaaggggcaggaggaatgaagaccaaatatgtatttcacactatcacaccattcacccctggtctttggacatggttcccttataccaaaagaatatacaactcaaaagatactgccacgttactagaatcccattcaatcatgactaattggttcagtccatcatattgtatgaatgtctcccagagtaagaccactcaagtttgcagccttccattctatcttgtcaggttctaaaagcaggagtggtctctgcacacatatagtttcaccctctcaggcatctggtataattgagctaagagacaatgtcatcccatgttctgagcatctttcaaggtgttaacgtaatattagatttccttcattacataacccatttattcattcctttaccttcagctaccattcttccttctcttcatttatatacaaacttttccatctttgcaaggaacactgtgcttgtctggactgcaggcagcaatactagtctagcaagtacctgccccacaatccactcccattcagactgggtaaggttacacaggtgcagaaccagtgggctggtttcactaccagacaatatagctgcatccactattagccccagttttgccagatagggtggaggtacaatctgcctctatcaggcctttagggaattctgacaaaaaagggatatgaagagatttgttaaaggatgcaaaattatagctagataggaggaatgagttctagtgttctatagcactgtaggatgactccagttaacaataatatatagcttcaaatagctggaagggggatagtgaatgttcccaacacaaagaaatgaaacatttttgcaatgatggatatgtgaattaccctgattcaatcactatacactgtgtgtatcgaaatatcactatgtaccctgtaaatatatacgattattatatgtcaagtacaaaaaaaaataaccaacaaacaaaataacatagctacatttttttgcttaggaatcatccctgcttccagcacttgtagtttcaagacctggttctcgtcctagtgttactaacatgccaggggtttagtctagttcccattgctagatgcacagaaagccaacccctgagacaataagggttgccagggaagaagattttaactgggtgctgaagccaaggagaatgggaaatcagtctcaaattcacttctgacggactaaaactggggggtttatatagtggtgaaggaatgtaaaacaggaattagggaggagtaaggaagcaattgagaaatgagggatttagtctctcgttgtctgtgtggtataatctggtgagtttcagtcctttgcctgaaggtcagttccaaaggaaagaactcaagtgagacaaatgtaaatttcaaattttaacactaaaagggtcactttctaggtttattcaaaaactcagcaggtgagatggctcactcacacctgtagtcccagcacttctggaggctgaggcaggaggattgcttgaggccaggagtttgagatcagcctggccaacatggcgtgaccctgtctctacaaaaaagtttaaaacttgtcaggcatgctggcatgcatctgtaggatatgcaggaagctaaagtaggaggatcacttgagcccaggagatggaggttgaaatgagccaggtttgcaccactgcactccagcttggatgacagagccagaccctgcctcaaaaaaaacaaaatagtaaatgccacttctatgggacaattgggttggttttactaggaccactgcatcaggtaggagaaaaaaatgaggttatatctggaagaaagaaaaaaatatatagtcattatagcaacttggtaagaattgcatagccacaccagcattctccctacccccactttcccaggtcaaccagaaaacaggaaagtctagtggtgacgctcctctagtcccatcaggttgagtgtgagcacacaggagggcatgtaagccaaatcttcctgtttttttttaaatttttatttttatgggtacattaaaaaaaattatggctacatccttcatgcttttatctcccctgtttttgacaaccaaagttttaattgctcattccacttcttgatcaaattattacccaaaggacagctctctgcccattgctggacattatgggctagacagtgtgttccttggtcggaagaaatgacggcagcctgtgcaaatgtgtgtaatatattctgttctgattcttttacagcactctgagcatttgcatcttccactgggtaagcaaaggccagcccagagtcagcgtctattcctgtcaagacccatttgtagccccccagggctaccagcatcagcctcacttgccagctgtgcttgggaccttcccaccagggaatctggcccatagccatctgcagcttctgtctctcctgctggcaaacagaacagttcttattggcattatgtgcctgagagggtgcaatagaaacatatttagattcagcccatctctgcactgctgcagtgccctcatgtcctctcatttcatgcacccaggtggccacccagtgagcacacagggatatctgcttgtcgatttcaatcaccttccagacctggaagagagctcttctggtgggcattgacatgtcctaccttaaggacccctcaaatttccaaagggctgtgtgtgtcccatatggacatccctttaataggctaggtttccattatccacctgcttgactatatggccaagccattggccactgcctgtgagtcagtaaaaacccacacggaagggcttttaccactgttcaattcttcagcatgcaattcagctcactggacggatttgtttttatcttctttgatcagaatggcatccttctaaatagaacgtggtcttttcatcttggcactgtcatctgcacaccaagcagctctttgttggctagttgagagctgtttatagggcactgtccaagtggcagtaggatccagctgctccccatacgcttccagagtcagtccgagggagaaagaggctccttttttattagtatctcctccttgcattccctaggtagcatgatcctgtataaatcatttctaatttattaggggactcttctgggcattttaatctccattagagtgtttttaaacataatccaagagattattggtatttcaggcttcaagatcattttatgtcctcagtcataggggtagcttgaattaatatcccatagaaagtagtattatgctcttcaaattgaaattctgtagtccagagtctcagtagttgtcactggaaggtgcttataggctgttcccataggccccagtctgggttccatacagggctctgtctcagagaatttgtccatagcatcactctgtcttctattctacattttgtgggctccagagatctgactggttcctatttagcatgtccaattaatattgattaaaggcagatttacatggcttttgtttcataatgctaggtatgggaaacatttcccagtctgatacaacatccatccccataatataatcaggtaaaatcacttcagagaaaatgtgttcaaatataccaactctcctataaaggtttatcttaattccaccaaccctcactttcctaactgtagcctctattagaactttatcaatggtttttggtttcacaatactacaacccttaaatttttacattctctcaatctaatcccaagtcaggacttcaccaatggatgttggtaccatagtcagtggacctcccatatcaaggagtcccatgaatttctcttctgcatccctgatcattttgtccacttgtgtacataaggctttaggtccccatcagggcgttgagcaaaagaactcttgcttgttggttaatctttatcttgattaaactgccagactattgccccagaaaatttcagatcagatgtcttattttaatctttgctttctgacttttaaaatttctccaaactaaggtaaatacagcaaacttttttggaaccctttaatgttagggaaccaacaagtactccctttggcccacccaaccttaaatagtattatattaagacttttgttctaactccatcaatttctgttttactcatcccacttctgacaccaaatctgaggctatagggaagacaaccaaagtgctttttctattctctcacttaacaatcaacacttctcttttgattggtgtcaccaagaattgtgtagggatttctccccaccagcaaccaattaatcagttctgcagtggacacgaattgggtgtactccaattcaatcctcatacatctacctggacttcacagcagatcccacaagttgagggcttggtcccacaagactgtcccccacttccaatgccaattgtaggctccaggttctttacctgtgcttctgactgaccagctataaattggggttccataacacctttctcttcaattaattttttagagcagctcaaagaacttagaaaaacacttatgcttaccagtttattataaaggatattacaaaggatacaggtgaagagacgcacagggtgaggtgcaggggaaggagaatggagttgccatgccctctccaggcatgccaccttccaggaacctccgtgtgttcaactgtccggaagccccctaaacccagtcttttgcggttttttaatggaacattcattacatacgcatgattgattaaatcattgcccattggtgctccacttaactttcactccctctcccttccacagaggctgggagatgagctgaaagtcccaaccttttaatcatgccttgttctttcctgtgaccaacccccatactgaagctacctggggcttgccagtggacgtagcgggggtgttatgaagaccaaatatatatttcacagtatcacacatttatagctcttgggatgtaaaaaattctccatgtctctttgtcctcacctgtgaaatagggataaagataagtgctgcctcagaagggtgtcatgatgcttcaaggagataatatgtacaaagtgcttagaaagatccctacaccgagtaagcactcatattttatcaggcatgggatgggccatttcaggaagagggagctcctgttctcatcctaagtctgaacggtccggaattcaaagaggatcaataaatggcctttcaccaggatcacaatggattttgtagagtggtgggctggcaagctgattcagtgttcaccattgctgtggtgtaaatcctcccaacatggccagtttcaagctaataatggtttaacacctggcttgcacaatttctgaaaatttaataatcagctcttttgagccagtgcaagccacctgcagaacaccattaacttttgcatcacccagttttgtgaacgcaggcaggtctcttcctccctctgtatcttacttccctccatctctccaaacggagctaagccatccgactcactcatgcagtacgtatttatttgagtacgtactacatgtcagtcactaggttgggctctggaaatccagccttgaacaaaagcagaccaaaacaaaaacaaaaaactccgtgaagcttacattctggaagtgggagtagggggagagcaactaaaaataacagtgaaagaaggaaatcggccgggcgcagtggctcacacctgtaatcccagcactttaagaggccgaggcgggcagatcgcctgagatcaggagttgaagaccagcctgactagcatggagaaaccccatctctattaaaaatacaaaacgagccgactgtgatggtgcatgcctgtgatcccagctgctcaggaggctgaggcaggagaatcacttgaacccaggagttagaggttgtggtgagccaagatcataccattgcactctagcctgggcaagaagagcaaaactctgtcaaaaaaaaaagaaagaaagaaagaaagaaagaaaagaaaaggaaaaggcaaaagaacattgttagtgctatgaagaggtatgacgtagagttattgtgctgggagtagcagctactttggaaactatgatcaatgaaggcttcttaaaggggagaagatgagccttaaataagaaagagtcatctgccagtgtggtaggaagagcattccagcgaaagaacggcaagtacaaagaccctggggctggaattgttcggtttgtttaaggaatggaaagaaggtcacagcgagctgagtgattgaggcagggagtggccctagctggtccaggtgtttagtggtggttgttctgaaggtggaggcaaaggtagaggccaagagagtagagcataggctgctacagccagagtcctacagggagaggtggtgaaagctcagaccaggatgggagagtaagaaaaggacaaagcagagatttgttttggagacagagccagcggttcttgcagacaaattggatgtgagtggagggggaaggaattgaggatggatatgtttctgaggcagaacagcccctactgggtaacttcaaaagctcctgccttgaactgctacagaaataacgtagactcagagattattttgctcctgcgtatgccaaggggacgggaacaggagggtggaatacacctagtaaacagatgcaaagtggaaaggggagggagaaactcactacaggtttttgaggtgctggctggagccaggagctgctccaagatctctcattcttctcaataaccttgggcaatagggaattttccaccttgcaggggaagacgctgaggttctgggaagagaaatggcttgtccaaggtcacacagccaagtcagtgaaagaacagggagccaggatgttttgcacctaaaccctggattatggtttcctccccacctgctcccccaagataagtcccccaatcccttcccattgccttattatactggggatgagggttggggtggaggaaaaaagcaaatttcactccaaaagtcagtgttttcgttatccatgaaaatagatggaaaagctgaactgtggcccacaggaagaggggcctgggggcctggcctcctgggtctgagggaggagggggctgggggcctggactcctgggtctgagggaggaggggctgggggcctggactcctgggtctgagggaggaggggctgggggcctggactccagggtctgagggaggaggggctgggggcctggactccagggtctgagggaggagggactggggacctggactcctgggtctgagggaggaggggctgggggcctggactcctaggtctgagggaggaggaactggggacctggactcctgggcctgagggaggaggggctggggacctggactcctggctctgagggaggaggggctgggggcctggactccagggtctgagggaggaggagctgggggcctggactcctgggtctgagggaggaggggctgggggcctggactcctgggtctgagggacgaggggctgggggcctgggctccagggtctgagggaggaggggctgggggcctggactcctgggtctgagggaggaggggctgggggcctggactcctgggtctgagggaggaggggctgggggcctgggctccagggtctgagggaggaggggctgggggcctggactcctgggtctgagggaggaggggctgggggcctggactcctgggtctgagggaggaggggctgggggcctgggctccagggtctgagggaggaggggctgggggcctggactcctgggtctgagggaggaggggctgggggcctgggctccagggtctgagagaggaggggctgggcctggactcctgggtctgagggaggaggggctgggggcctggactcctgggctgagggaggaggggctgggggcctggactcctgggtctgagggaggaggggctgggggcctggactcctgggtctgagggaggaggggctgggggcctggactccagggtctgagggaggaggggctggggacctgggctcctgggtctgagagaggagggactggggctagtctcctaggtccatgggaggatgagattgggacttgaaggaggagggagctgggttttaggaagtatcccagactccgtgttctgcggatgtggtggaaagacgtggggacgcctggggcgggaggggtaggggccgggccgcagtaacaaaggcctctccctccaacaagcaacccccccttgaccccgcctccccggccccccacctctcctgattggccggtctccctgcccgtcagcgccgcccccctccccgggtctgcagcagctccagccgcctcgtcgcgcccccccagccccctccccccgcccccgccgccccccgggccggtgcagcgcaggcggggtccccctccccctcccccctctccccccaggcctcgcgcgccccggaccggccccccctttcccctccccctccgcgccgcctctgccgcgatgcccccccctgcgcccggggcccggctccggcttctcgccgccgccgccctggccggcttggccgtcatcagccgaggtaccgcagcgccgggggcggggggctcggccgggacgccagggtcttgggtgggtaatcgggggatcaggggtgggggtcgagggctgcatccctgggccggcgcggggaggccccgggacgccggggtctgggcccgggggtggggtctgcattccctggctgggcagggggacctcggacgtgggggtccgcgccccggggcaggggtcggcgtcctcgggccggagccgggtctaggggcggaggtctgcttccccgagcaggcaagagggtcgcagacacctagccctgcctgggggcaggagtctgcggctcctgttgaggagggggcagacactggactcggggtccccgggtcggatctccgaactgagttggggtggggggcaggggataatgccctgttaggggtcttcatctgtacgtggagagggtccctgaagaggtccttgccgggggctggggtagtcatctcgggacagaggtcaggggatggatgccttcccagggtcagtaagaggaggggacaagggtgtccacagacctagtcccagggtcaggaaaagaggggaagggtctgaaatcccccagcagggtcatctaggttgagagaaagtgttggtacttggggaggttgcagttatgtgggggagaagggagctggagatacaggaagttggggtgctgggctggggtcttggattcccaagctctgattgaatgtctaggttcgtggggctggacagtggaagagcgatgggcatgggaggatgaaggaaagacggaagggaagggttaaagcaggttgaagggttaaccccggcccggcccggccctcccagttggggagagggccaggggcaggtttctgcactgaggttagatagctggaccttgagtctccccagtagggcctggcaggcagggggtggtcaaggagattcctagatttccccctaagaaaagggaggagagtgcaaggaggcaggaggctggagggtgggcgctcaggagggcagggagctgggttaattcagactttctggaggattcccccaggccctcccctgaacaaagagttccagggacaaccaagaaccccgacagagtccccaagagtctcagagaggccgcccgcatagaccaagtctggcacagaaaccccgtcacagcgtcccacccgaagcagcacctgcagacaccagtcacacaaacacagccccatccacgcaggacgcagggacctggtgggccacagcctcagtcccttgctagtcctcccccgtctcccacctgaccagtctgaatcgccctctgactttctgaccacctgtctctgtctctgtcatgcatctctttaggtctttgtgtccctgccatttctggaggttcccatcccttcccatctctgttatccactgctgactttccacctgcctctgtctctgggtcattgtctctccatccctgctgctgacagcacagttccacatctgtctgtctctgcttttcagactgttgcccattgcatgactcagtctcttgatacttgcttgcttcctcacttatgccttaatcttcattaacttctctcatttccttctctcattcatttccttcttgttctgacctacctttctcttttttctttctctttccttctttctctttccttctttctttctttccttctttctctttttctctctctctctctttttctttctttctttctttctttctttctttctttctttctttctttcttctttcttctctttttttctttctttttcttgtttttttgagacagggtctgactttctcacctaggctggagtggagtggtgcaagcatacacagctcactgcagcctcaatttccctgcctcaagcgatcctgccacctcagcctctggagtagctgggaccacagatgcacgccaccacacctggctaatttttaattttttttctttgtagagatgggggtctcactatattgcccagactagtctcaaattcctggcctcaagtgatcctcccacctgggcctctcaaagtgctgagattacaggtgtgagccactgcaccagccacctcttctttctttctctccttgtccttatctcttgtcttcttcttcctcctcttctttccctgatcctgtaccctttgtgacctttcccccactttcctgtttcttctctccctccccttctctctctcactgcaacttcccatttttcacattcactattttttttttttttgaggcagagttttactcttgctgccaggctggagtgtagtggcataatctcagctcactgcaacctctgcctcccgggttcaagtgattctcctgcctcagcctcgcaagtagctgggactacaggtgtgtgccaccacgctgggctaatttttgtacttttagtagatacagggtttcaccatgttggccaggctggtttcgaactcctgacctcaggtgatctgcccacctcagcctcccaaagtgctgggattacaggcatgagccactgtctggcccccacattcattcttaaagtccctataaatcattacggggctagactggggcaggaagctgtggcagagccaggaggtggcttgtgaccctgctcaagtcttttcccatctctggtcttaggttccccttttgagaactggggacgagaggggatggggtggggttgagacagaacgagatgccagaaagacacccccacccacccatggatagtttgagctgtctgggaaaaaaagcttatggcaagatatgcaaactagcatcttctctcttcttttattcatgatcttgtccaagttacaagaggaatacactgcaaacagtccgcctctgataagggcaaaccccattgtgctcctgccctgccaccactctcacaaccactgtcttgagagaaccggtctgtggctggagtgcatccttccatagctttctctcacttctgcagacttagacacgacacacagaggacaacataagtgatggattggttggtttgttgatttttttcccccaaaatagaaacaaaataagcccatttctctgcaatcggccttttcccacttaaccatacctcccttacatccataaatattcatctatcttcaattcttttctaaatcttttatgccaacacacacgcaccccctcacatatacatatttatttacaaagcagctacattgtggtattttaaaacaattcaacaaaatcaaatggccgcttctgcagcagcaaatgaggtgggtggttcctttgcttctggggcagctagcagagtgatgatggtcaggagggggcaggagccccagatttgagtcccagcactgcccctgacaagctagctctccccaggacctctgagctccaggttcatctggcttgtgggctgtgcttggttgttggttcatatagcaaatgttcttggggaccagggccgctattctagacactggatatatacatatggcagtgagtgaaccaggcagtcactgtcctcacggagcttagatcatagtgggatggagagagatcaaagaccaaaaccaaaacctaaagacaaacaaataaaagataatttcagagagtgatgagtaatgtaaagaagataaaagtgacttggcctttgaagctcaagtggttgaggaaaccatctctgagcaggggagagtggagttaagacctgaaggaagagggaagtcaacctttttttttttttttttttttttttgagacagagtcttgctctgtcgcccaggctggagtgcagtggcactatctcagctcactgcaagctccgcctcctgggttcacaccattctcctgcctcagcctcccaagtagctgggactacaggcgcccaccaccacgcctggctaattttttgtatttttagtagagatgggtttcactgtgttagccaggatggtctcgatctcctgacctcatgatccgcccgtcttggcctcccaaagtgctgggattacaggcgtgagccaccacgccccgccggaagtcaacctttcaaagttgacagcagaggtaaagaccttgaggtgggaccaacagaaaggagggtaaagctgggcgcagtggctcacacctgtaatcccagcacttcaggaagccaaggcaggtgaatcacctgagctcaggagttgaagactagcctgggcaacatggggaaaccccatatctacaaaaaaaaaaaaaaaagccaggcatggtggcacgcaccagtagtcccagctactcaggaggctgaggcaggagaatcgcttgagcctgggaggtggaggttgcagtgagccaagatggtgccactgcattccagcctgggtgacacagtggtaccctgtctcaaaaaaaaaaaaaaagaaaagaaacaaagggaaagaaaaggtgtgtctagtttcaggattcttggcacagtgtctggactcccctggtgtcggtgacgctaatgccctcagattttttctttttttttctttgtttttcttttcttttcttttctttttttttttttaagacggagtctcgctgtgtcacccaggctggagtgcagtggcacaatctcggctcactgcaacctccgcatcctgggttcaagcaattctcctgcctcagcctcccaagtagctgggactacaagcacatgccaccatgcccggctaatttttgtgtttttagtagagacggggtttcaccatattggtcaggctagtctcgaactcctgacctcaggcaatccatccgccttggcctcccaaagtgctggcattataggcgtgaaccaccatgcccagccaaccctcagaactctgaggtcagcaaagggaggaggaccctcctggggactcctgggtgccagacataacaggcccagccccttctcacagcctttcccagccagagccgcaccccctcctccctgccccagtctcatgccccgcccctccaccccctacctcccaggtttcccacctgcgtcttctgagactgtggaatcagagtatcaccctcccgacccctgccaaccatttcagggttccagctttgcctaagctccttggcagggcggcagaagattctcacccccagcccaaggtcactcagcttgttagggatctctttctgtcttaagaaaagtcacctgcctaccaccttcattcccaggtttatcaaacaggtatgaggcctgtgcgtctggactgtaaatcctacgagggcagggaacaagtgagccctctgatcaccgccagacacctcccttgccacaggccggtgcctgccacataatcaccctaacagccagctcacggacggctgtttgcaagcacttaactggcaggcactgtactagaacctttacttggattacctcttgtaatcctccccacaacccagtgaggaaggcatgattatcatttccatttcaggtggggaaactgagtcccagagaggtgaagtaacttgtgtggctcagcagcagagctgggacttgaacccagctgcctggcagccacactgcattccctgggccccctggttatgcaaggttggctttatcagtagatgcttaccagggtgtctgcccaggagtcagtgactcagagcaactgacagcccagatacagccctgccctccccgctcccctgagtggagcatctagggagacctatgccaagccagggatagcaatagatggttcctaaaaaagaaggtgctgttaggaaccgctagcatttattgggttctttccgaatgccaacagctgagctagacacttctgcttgcatattctcacggaatccctcacagaaacccttgcagggaagaactactatttttcaccttgtacagttggagaaactgaagctcacactggccaggagtgggggtcatccagctaggaagtggtgggacagacgtttgatcttccaaccctagctcctcagggatttattatctggtctctgaggaccatccatgccctttccacaaacacttcccagttctgagattggctcgaccctggggggacacagctaagattcaagccatcacaaagctcctcatcactgtctcagctaagtcaaacagtgcccagaagaaggagtgggagctctgccttgaacagtcagaaaggtcctcctggggcaagggacatttgcattggggtcttgaagaatgagtaggagttcaagagttgaagagtgttgcaggcatccatttatattcatccattcaacaaatatttcccaaggcctctggtgggccaggcccagtgttgggagatgctggggacacagacttgagtcagaaccaagatttacccccaagaaacttctagtctgatagggaggccagatacagacagtcatcagagtgcaatggacaaagtcctgaggcacccggagtcctgccttccctgcagggtccacttcccaccccagtgaccagataataaagccctgaccaggcactctggctcacgcctgcaataccaacatttgagaggctgaggtgggaggatagcccaggagttcgaaaccagcctgggcaacatggcaagacctcgtctcttaaaaaaaaaaaagtagccaggtgtggtggtgcatgccaatagtcccagctactcgggaggctgaggtgggaggattgcttttgctggggaggttgaggctgcagtgagccatgatcatgccactgcattccagtctgggcaacagagcgagactctgtctcaaaataaaaacagaaataaaaaataaagccccaagaagcctggagtggtgtgtgggctcaactcatgggggcagtgcctgcttcaatcagcagctgagttcaggagccctggagcccctgaaccttagggtaggcaccttggacagctccctcttccccccacttcttggttcctgtaggacaatggctctcaacggggaagggggtgtgtgattttgccccttacggggcatctgacaatgtctggaggcatttgtggtggagaagggcatcaaatggatccagatcagaagcgagacgctgccgacctcctatgttgcataggacagtctggccccaaatgtcagccgtgctgaggtttaggaaccctggcccagaaggtgtgtcagcaggagcatagcaaatcctgtgtgtctgggggatagggcagggtacgtgcctgtctgttttcaccagcctaggaagggatcttggtgcgtacatgtgactctttggcagcactgaatgtggcactacccgtcgttcggtccaggtttttgttggtgactttccaattccctgtgtgtgtgcgtgtgtgtgtgtgtgtgtgtgtgcgtccagccgtgtgtgatctgatcacaggagacaacatgacctgattctcggcccagcgtggccccttcgtgcttgaggggatgtgacagtgttgctgtcttgttacacgggttgtagctttgtgtgcgtctgacccagggccttccaaagtgcaaagttgggaatcatggtgctcgcaccagtggtgtctgtgtaaccagttaggttagtaagcgtgtgtgtgtgtctgtcttcaccagcctgggaagggatgtaattgtgtgtggactttgcagccatgtgtggggctgttgatgtcgatggaaccatgtgggaactattgtatatgatggggtgactcagggtgcagcattgcttggcctgaatgtgacaatatgagcgctcctgggacagatcctcctttccagctgacctgctgctgggtgcctgtgcagagctgggtctgtcagcatcactgtatatacacacctgtccctctgagcgggtccacagccatgcgcgtgactgagagggtgggactgtctcctgtgtttgtatgcgtgtgattgtatgtgtttgtgtgtgtgtgtgtatgggtgtagctggagctgtttgtgtctgtatgactgtgtctgtacctctctgtctgggtaaggacatagcaagtgtggggactatttctaggcctggagaggtctccgtgccttgtccaagcctgtgtgtgtatgtgtgtgtgtgtgcacgcgcgtgcacgcgtgcatccatcatccatccccaagctgtctcctgttgctcccagggctgcgtgtagcagtgtccactgtgtttagctcggggagggtgagccccctctctccattctctttaaatcccagcagtgactctggcatgagggggcccagggtgaggggctgcagggcccagccccaagccccagagcctgccaacccactgcacctggctccgtcctggccccatcctgtggggctgctgatggagagggcccccgggagtcattggggcagcacgggccattaattcattatattaattagctcttcgtctgggctgggggcagggcagccccgcgcaggcccctcccactccagaagtccaaggtcatccagccggccttcctccctctccgcctggtgccagctccaccgcctccgcatgcccagcccccactccctggccctggtccagcccgctggccacggtctacagagagatgactgcgtgggggtgacggagcctgcctgctgtgctgaagtgtgcgagtgggcatgggctcacacctgcaagcatgccctggcaaacttgagcacacagtgtgcctgtgtagatgtgtgtgtctgcaaaggtttgtgtgtgtgtgagggtgtatttgtgcatctgtgatggatgtgtgtctgagaatgtacacatgtggatctctgtgcgcacgtgttcatatctgtgtgtctgcaggtctgttacatatatgtgttatctacatgcatctggttttatgtgtatgccttcggtacatttctgagttaatgtacgtgtgcatctgtgtacttgtgggcctgtgtgtatatatttgtgtgtattcacgtatatatgtgtgtttctgtgtgtatgcatatatactatgcgctcatctttgcataggtacatgtgtgtctgtataccgtacctatgaatatttgtgtgcccatgtacatgtgtatttgtgtgtgtgtatgtgtgtatacatgtatctgtgcataagtgttctgtgtatgcaagtatctgtgtgttgatgtacctgtgtatatgtctgtgcgtgtagaccatgtgtggatgtgtgtacatatctctgcatatgtatatgtatctatggtaattgttggggttctttttgagaccaagtttcgctcttgttgcccaggctggagtgcaatggcgtgatcttggctcactgcaacctccgcctcccgagttcaagtgattctcctgcctcagccacccgagtagctgggattacaggcgtgctccaccacacccggctaatattttgtatttttagtagagatggggttttaccatgttggccaggctggtctcgaactcctggtctcaggtaatcctcccacctcggcctcccaaaatgctgagattacaggtgtgagccaccgcacctggccgtatctatgtaattgttaatctgctcatattggtatgtgtgtcgctgtactctgtatctgtgaatgtatgtgttctgtgtacacaggtatctgtgtctgtgtatatgtgtctgtgtgtatgtcttatgtgtacatgtgtctgcatgtatatgtttgtacatatgtctctgtatatatatgtgtctgtgtacacatgcatctgtgtgtatctgtatgtgtgtgtttgtgtgctacgattgtctctgcatctctggaggtgtgtaggtttgtatgtccatggacacctacccatctgagtctgtgagtctgtgtgggctcatgggaagatacatgttgcatgtgtctgctgtgattgtgtctgctgtgtgtgtatctctgaaaacatcagtgcatgtgtgtggcagcgggtgcaggagacgtctgtgtccgcaaggacgtgtgtgtgcacgtgtggtgcatgtgtgtggcagcgggtgcaggagacgtctgtgtccacaaggacgtgcgtgtgcacatgtgtgcaggtgctaccatgcccgggccttgcctgagctgccaaggctgagccacccccaccttccacagggctgctctcccagagcctggagttcaactctcctgccgacaactacacagtgtgtgaaggtgacaacgccaccctcaggtacctccctcggtgggtggggactcagatctcatggagccatgcggtcctgccccttcaccttcctgggtggggatcctggttacaggaacagcctgggatgggaagacttgggctccacattccccctcagtagcgacacagctatgagctggctccccctcggcttcagtgtccccatctgtcaaaggggtggagagagggggcagagacacacacagagagagggacagagacccagagagagagagggacagagacccagagagaaggggacagagatccagagagaaggggacagagatccagagagaaggggacagagatccagagagaaggggacagagatccagcagagagggacagggttgctgtttccccaggtctccacctctcctcaccctggtctctgttcccccctctctccacgcctctctctctctctctctctcgcttgctctctctctctctctctgtttctgggtctctgtcccccctctttctctgggtctctgtccccctctctctggatctgtctctgggtctctgtccttctctgtgtgtgtgtctctgtccctctctgctggatctctgtccccttctctctgagtctccctctgggtctctttccctctctctctctgggtctctgcccccctctctctctgggtctctgtacccctctctctgtgtgtctctgtccctctctctctgggtctctgttctcctctctctttctctgggtatctgtcccactctgtctctgggtctctgccccctctgcctctgggtctctgtctccctctgtctctgggtctctgtccccctctctctgggtctctgtctctctctctctgggcctctgttcccctctgtctctgggtctctgtccccctctctctgggtctttgtctctttctctctgggtgtctgtatctgtgtgtgtgtgagtctctgtcccctctctctgggtctctgcccccctctctttctgggtctctatccccctctccctaggtctctgtagctctctctctgggtctctctctctctctctttctctctccgggtctctgtccccctctgtctctgggtctctgtgtctctctctctctctgggtctctgtccctctgtgtgtgtgtgtgtctctgtccttctctctctgggtctctgtccctctctctgggtctctgtccctctctctaggtctctttctccttccttctgcatctctattcctctctcccagattctctgttctcccctttttgtgtctctgacacacacgatcactcaataaccacgagctattgttccgttctgcagttgggctcacagctttccctccctgaggctcaacttacccccagctgtatggtgggcacagcagcatccgcctcacagggctgtggtgggacctggagatgcggtggcctccttctcccacccaccccctcggtgggggaagcctcaggctgggtgggtggagaaaaaccttcccactcattctccctgcagctgcttcatcgacgagcacgtgacccgcgtggcctggctgaaccgctccaacatcctgtatgccggcaatgaccgctggaccagcgacccgcgggtgcggctgctcatcaacacccccgaggagttctccatcctcatcaccgaggtggggctcggcgacgagggcctctacacctgctccttccagacccgccaccagccgtacaccactcaggtctacctcattgtccacggtgagcccttggccggggcctggctgggtggaggggttgagagcgtgggggagactaggcatgatgacagataccacgtgttccccaaccccagggatacatagcgagaaagacagacacagccttgcccttggggatttcagcccagcagaagggggccagttacacagacagtgacgcatcaacatgattgcttctagggcaggagagctacagggatgagggggtgcttgggggaagaccacgttcatttgttcagccccattcctggagggcctactctgtgtaagcattgatctacagaacaaggcaggctgtccccacaccttgggagctgattttctgaggacaggctcagagaggacttcccagacgtgacgtctgagctgacgcctttggctgggcacagggctaagaccggaaaagaaacagtgtgtgcagggccaggcaagaagatgagccaagtgtgcaaagggaagtctcatgaggctggaagcgccagatccagagcaggagagatggggctggagagctccacagtgaggcgagaggcagagggcatctgaaatggtggagggtagggagcacctggagagacaggacctggagacagagagaatccagggggatcctggcaagctccaactctggagccagactgcctgggttccaacctcagtgccaccgtccaccagcccagggaccttgagcagggaagaggcccgggactcctttgcaaaatggggatggtgctgtcatatgtcaaatcccagacgtcgtcaattagaagagctacttttattttatgccctactagaaaagaaaaaacaaaaacactgccagcgataccctggcatcctatctcgagggccatcctgcttggagaaatgttcaaatgggagaggggagtggaaagcacagatgacttagaattgatgaaatacagtaacatccaccccagaggctggtagtgagcatctaatcagtggatttgggtaaagcacttagaatagcatctgttacacagaaagtcccatgtgggtatttgttaaataaatttatttaaaataataataaatacaaatagagacggggagaggaattcagaccccaagatggagaaaccaagttaggatgaaggtggagagagaatagagacaagaccagcaattagacaagaagatgccaggcccagacagaggtttcagagaaaaaggcagagactcctgggtctgagggagaaggggctggggtactggactcttgggtctgagggaagaggaactgcgggtctgaactcccgggtctgagggaggaggggctgggggtctgaactcctgggtctgagggaggaggaggggctgggggtctggactcctgggtctgaaggaggaagggctgggggcctggattcctgggcatccatattcagcctctgccgctgcccgcagtccctgcccgcattgtgaacatctcgtcgcctgtgacggtgaatgaggggggcaatgtgaacctgctttgcctggccgtggggcggccagagcccacggtcacctggagacagctccgaggtgaggaccccatcccaggtcaaaagccccgtcccccactgcgcagtctgggcccctccattccccatatccctagctagtttccccagcccccttctccctggccccttggcttcccctcccactctgcttccagttatttcatccacagaccacaaaccccagacctaagaggcgtcaccactggctttccacctgccgtcctaggcctgggccactgcttctgcgtcacttgccaaaccccagcctgcgtcacttccccaaccccagtgtccccgatgtctccccacgcgctcacagcattctcctgggctgagatcccctgccactaggtgccctaagccaggctgcaccagcggtcctgcgtacatctctgcctctctcttctgctggacgctctagcccagcgggcctcatggtgtgggccccagacccgaagcatcagcataccttgggaacttgccaggaatgcactttcccaggctccaaccaagacctgctaaatccaaagctccctctcgctccacaagccccaagaaccagtgctcaaggttacccacaaacggcgccagagtgcccatatatgacagtccaggtcctagacatcacccaccagcccttttatgtggatctccaccaccagatcccagatccctggatcctcattctcagggtctttgaagacccatggtgccagtcactagatcccattccctgaatccctggatcttaccccactgggtcatctgagccccatgagcctggtcttgacatctgggaatctctggatgccctaagtcccagagggtcttctgagactgctgctgtgttatgagacccccatatacttggattgctgatcccaatcaccagatcctgattccctagaccccatgaatcagatcccagaacgagggaccctgccccactggttctgtatttgctagatccttctgagacctaacatcctgggatccccctccccattggggtcctccccacggagctccatgatctgagtcagattcctggagggatctcctgaacccttagattctctaacccaccccactgggttccaggaactgagtcccagacctcactccttcccccacccccagctggagagatcccaggcccccggccctgcagcccctcccccaccccacccccattgacccgggcactccaggccttgccgtgcccgccccgctgatgtgtgtccgtgttgtgcccgtgttgtcccgtgttaagtgtttgtgtccggccccgccccctcctcctccttccccccacagacggcttcacctcggagggagagatcctggagatctctgacatccagcggggccaggccggggagtatgagtgcgtgactcacaacggggttaactcggcgcccgacagccgccgcgtgctggtcacagtcaactgtgagcccccctggcactgggcacgaaagggtggcggacccccgagtccctggggaggagggatctgggggaagaggaagcgggggcgagacttacgggcctgagggaggcgggggctgggggcgggaccccttcgtccccacgcggctaggagaattcgctgacccttgcccctcgccagatcctccgaccatcacggacgtgaccagcgcccgcaccgcgctgggccgggccgccctcctgcgctgcgaagccatggcggttccccccgcggatttccagtggtacaaggatgacagactgtgaggacagcactgagggggccgtgggagcgggaaggggaggtctttagtcccttcgattgtgaggcagggggacggagcggggcgggggaaggcagcagagctctgggtcccgaacctggggcgtccagcttctaggtgatgggatctgtccagccccggagacaagcttgggtccccgcttgatgaatgctggaaccccgtctccccggacttttcagggagctggccaggggtcgggggtcaatgctgaggatctgtcgggcaagatttaggggaccagcagagttcaggagtccctaacgactaggggtgcactacgggagagtccagagtcctgagaggccagggtgcctggaggggggcggcggtgggagtgacccgaggtacatgaggtgctagaacccgaggcgatgggtcactggggtagggggcagaatgctgggtcaccggggaacggaggagcctgagagtcggggggctggcctggctgggcgctgcggcccggcccctgacccggatccctggcaggctgagcagcggcacggccgaaggcctgaaggtgcagacggagcgcacccgctcgatgcttctctttgccaacgtgagcgcccggcattacggcaactatacgtgtcgcgccgccaaccgactgggagcgtccagcgcctccatgcggctcctgcgtgcgtcttcgggcggggcggggccgggaaggtgggcggggccgggggcggggctagggaagtggagacgccgggaccgcccttcaggctggccctgaacttaggagatggacgctgagactgaaaagcaatgcgagtaagaaaccgatccacgcaatcaatattcattgagtgccagctaagggtttgtcgtgggggacgcagctgtgcacaaaagaaacaaggtttggggattcgcagagcttatagtctagtaggagtagaaaagcaataaacaagtggtcatgtaggtaaataagcaaacacatacataaacaaaaaataattttggaggccgggcgtggtggctcacgcctgtaaatcccagcactttgggaggccgaggcgggctgatcacctgaagtcaggaatttgacaccagcctgtccaacatggtgaaactatgtctctaccaaaaaaaaaaaaaaatacaaaaattagccaggcgtagtgatgggcacctgtggtcctagctattcaggatgctgaggcaagaggattgcttgaacctgggaggcagaggttacagtgagccgagattgcgcctgggtgacagagcgagactccgtctcaaaaaaagaaaaaaaaaaaaaaaaagaaacagagtcagaaaagcaggcacacccaatgagagatccagaaaggacgctaaagagtgggctcagaagagatggggcccctggagagacacacatggggttccccactctcaggcctccctccatgaccccttctcttcccccaggcccaggatccctggagaactcagccccgaggcccccagggctcctggccctcctctccgccctgggctggctgtggtggagaatgtaggcgcaacccagtggagctcacctccccctgcagggggcctcaggccaagagtgagagaaacgggggagcaagagccgtgggtctcgtgggggcagaagagctctcggccaccaaggaagaagagagaggagaagaggaggaggcagaggaagaaagatcttcagagaacccatcactgtgagggataacgcaaaattatgcatctttctacagccattctcgccacccgttcacgtttccgattgtgacccactcccgccaccccatacccctctctcttagctcaggctgtcaactggcttgtgtgggtgtgggtgtgtgagtgtgagcctgcatgcatgtgtaggtgtctgtgtctctgtttgtgtgtgtgtgggggggtgggctgggggaagggactcagccgtcctcccgcccccaaaacccccatgtccactgtccccaaccctattgcctctcacctctggctggaggtaggtatgaggctctgcagtggaagctgtgaagagaggcttaccaggctccctgcttccccaatatatgcacgcacactacccctccccctgtcgaaagggcaactcctggcaggttgggagtggggaggggcatcgcactcacctgtcaagctgtcattcagcctttgtgagtaagtgggggacctccatctaggctctgggcttccctgctgtcaaccaccagcttcctgtagccagaggccccatcgctggctcagtggcctgagaccttcccacttttcctgtccctccacaccctggattttctggccccctcctgggccaatcggtgcttccatccaactgtcagactggtggcaggagtcacctgtctgtttcagtgctttgccctacccttgccaccactccccttggccttgatttccccacctgcggcaccagccagctgcccttggggcctttgcagctggcccacaggtgtgagcttgctggtctatcacttcctggcctctccaccaactgtacctcccaaaggctacctgaccgccctcacagacactcagacgcaccacacacacatacacacacacagacacacacacacacacacacacacacaccagcgactgtgaccagcaatagccccctggctccagctgtccggtagctggtgactagctgtatttccccctgggtaggcatctggtgtcaggaagggacgctgagaggccgcagcctcagctctgactgtaggaacactccaccctggtacaccacaccacacaaagtgggggacagagaggcatcacacagacatcctgagcccagacaaagatgccatgtcaccaactccgactcccaggagaccctctatataaacacccaccccaaaccacaccacccagagtctggtggagaaaaggagagggcaaggcgcagtgactgtacctcagacgggggcatgggccccatcccacattgtcttccattcccagggtccaggggatggggtgggacaggggagggatgctagggagggggtggggggccctgggggccatgtgttccaattcatggggagtgttgagaccaccacaccaataaacgcctttttccaaagtctgcctgcaggtgtcaatgtcattaaggattagagttaatgaagggcaaagggtagcagtcaattggtggtgcctctccagcatcattcctaccgcctactttctcactggtagacttggaatggactcattacagagatgccctgtgattggccgaagacacccagcatagcccatttcccaccgtgattggctcagagatgggcacatgacccagtaaggctaatgagaaagtgaatggattcccaagaagagatgcttttctgctggatattgtggctccgtgatgtgaagtcaacatctgtagggttgcttttctccatcacatggagagatcttggctctgtggggatagcaatggtggggaggacagcatatggagcctgagaaggataggaacactgtgaagggcagagtggaaaccttagagaaactgagtccatgattatatatcatttgagcagctggatcaaaacttaactgatgcccattttcacttatataagcaataaagtcccctgtatatttaaaccaatttgcattggattttctatctctagtaataaaaaagagaatgaaaaccataatagatacagaagagacatagaaggcccagaaccccaaccctcacctttccaaaaggatccaggggttctattttccaatggccttttctacccccaatcattaaccagaaattctctcacatgctttccttccctgagacagatgctggttgcccacatttgagttgtttggttcccctttcttcttcgctggcagatccacgtgttatgatacaggctagatatctggtttcctagcctcctttgcagctatgtggccagtttgggccaaagagacataaatggaaatttgcttgtaggtttccaggaaagcttccctcccaccccatgagagggaagaaggcagtgatagagggaggtagagggtggggaagatgtatagggaggaagttctgcccccttccttttatctttggatacagttgtgtgaagatgtgatgactggagctgcagcaaccatcttgctacgtgaagcaacatgcttagagtcaatgtgccaacccactgagggtggcagagcagatggatgcaaagggcccatgtctttaatggcgttactgagctgctgagccagcctgaaaccagccgcctccatagttcttgccaccattttattttgttacttgcagtcaaaagaatcctcaccaatgcactctctaaattctcaattagaaacccagctgaaaaagcaagacttacgctgaagacagcagcagcaagcccaactcttcactggcaccaaaacatttgatcagtcaacaaatatttattgattgcctgctgtgtgtgaggctctgggttaagtgctgagttaatgatgtggtctctgcttttgtaaagcccttagtttagagagagagtctcaggccacacaagaaattacatatttatgtatcaggaacggcaaattcaaggattctgggacttaacccaagactaagggaggggtaagggaacggtcgtctaagatggtaactgctactcttagacttgagaaatgaatgacatatgggaaaaagaagtgttataagcacagcaaactctaggggcaaaataaattgtggctgagagacagactgtgatactggagtccgggggcagagaaagaattgggaggggaggtcagggaggccaacagaggccagaccacaaggttttgaaggtcacgacgatgagtttggataatatctgaagggaaatgcacaggccgtagaagcgtttaaagagaagagtgacatgatctgatctgttttaagatgaagatgctgggagctggatggggtgtggcctacaggtggcaaagtgaatgtaaggggaccttttcagagaacatggccaagctccctctctagctcagagcaacacagcaagccctgcctgtctgctgcagaggcttggaggttgtgcaaaccacacagttagatcagcaagagtttcccagccaagaagtcacatctccttacttgcacaaatacaggaagactcttcttctgcagcaagagagggagacagaaagtcccactttcagggtccaaccctcagtcatagcaggccctggctgctgctggagtgaaataggaagttctggcccaaaacgccctgtgcagggcagaccactggctctgatcacacctgtgtggctgcgcgaacagtctttgagcctccgcctacagagacaactgaactggggtctgtgcctggaagagagaggtggggtgaggggagaactcagtaggtactctggatgtgacataactcacccgcctaactttttctagctcttgcttgaactttttagagattatctgggaaccctccatttggagaggggaaaaaaaatgcctggctatccttggtggagcgaagccagccaacaacccaacccagttgttattttttatttatttatttatttatttattttgagacagggtctcactctgtcatccaggctagagtacagtggcaccgttagagctcactgcagccttgacctcccaggcccaagcaatcctcccacctcagcctccctagtagctgggactacaggtacgtgccaccatgcccgactaattttaaaattttttgtagagatggggtatccctatgttgcccaagctggtatcgaactcctgagctcaagtgattctctctcctcaaccacccgaagtgctgggattacaggcatgaactatcacacccagtcacaacaatccttcttttatggggaatgaggtaactgtaccccacttcatagagaaaaatgggccttgcccaatttttatgggaaagaaaaatggaggggctgggcgtagtggctcatgcctgtaatcccagcactttgggaggccaaggtgggcggatcacttgaggttaggagttcgggaccagcctgcctaacatggtgaaatcccgtctgtactaaaaatacaaaaatcagtcaggcgttgtggtgcttgcctgtaatcccagctactcaagtggctgaggcaggaaaatcgcttgaacccaggaggcggaggctgcagtgagtcgagattgcaccactgcagtccaacctgggcaacaaagtgagactctgtctccaaaaaaaaaaaaaagagagagagagatcctatttccctcctttggagaagaaactggaattcactcttattttaatatacatcaaagttgggcgggaagctctgtccaactttgatgcatttttaaaaaggataaagttatacagactgtaaactaacaagtaaaactggagttagataattgagaccctctcatctccctgactgtaatacaagaagttccgccccgattccaggaggaaatgagggcacccacactcacttggtaggccctagttgagctgtggtcctccagagggactttgaggtccagaggccatgaaatctccactggggtcacactatgcatcttcttttctgagggggtgaccacggggaccaaggtagaaggatgcttctttttctcaggagtctttcctgattgagaggcagaagagaagcaggaacacgtgattggctgccccaacatgccaacccagccaatagcaagggaagctggttggagaggcggagccttatgctgattggctgatttggaggtaggagggcaggatggatgacctatgacggcactgattgcctcagccaggtcttccataggcctctttctagggtccctccccgttggtcatggttgccccttccccagtccccttgctcaccacgaaagcggcacaggcagcagatgcaaaggaggagaagtacggctagcagcgccaggcccagcagggagcccaggacgatgccagcgatggccccatggctcaacgtggggcctggaagagacaaagagaagaaagagaaggggaacaggaaccaaggttggacccaagtttcctaagccccctaactttgtgctgggacccaggagtccggcccccactgtccctcccctcccagaacccaggaatgtgggaccccagcactctcaactcatttaacagttactgagtgaccgtggtgtgcctggctctcagacaggtagtgaggattcattcgtgggccaaacaggaaagatatctacccttatggggcttaattctaggagagaagacataaataaatgagcaatacataagataatcacagattgtcccgagaaagaaaaagtgatgtgatagagataatgggggacaggtgtggtggctcacacctgtgattcccaacactttgggaggtcaaggtgggcaaccacttgagcccaggagttggagaccagcctgggcaacatagcgagatcctgtctctacaaaaaatagaaaaactagccaggtgcggtggctgcgcctgtagccccagctactcaggagactgaggcaagatcacctgagtctggggacgttgaggctgcagtgagcccagatcgtgccactgcactccagcctgggcatcaaagtgagaccttctctcaaaaaaagaaaacaaacaaacaaaaaacaaaaaaggaacaatgggaagggatgtgacatttagaaacagtggtgagctcaggtccctgaggaagtaacgtttgaacagagacttgaagaataaagaccagagacagtcatactaaacccggggaaagggcgttccaagaggagggaacagtaaatgcaaaggcccagaactagaaaagctttctctgttcaacgaaggccagcgtgggtggaggataaggaaggagcgggctggaggtggagagtgaagtagaaaaggtttccaggaaccagatcctaaaggggtcctgcagaaattaatggacggcttttatgtagagcagcctcatgatctgatttgcataactttggcttctgtgtggagaatgcattatctgacagcaagagggagtataaagagaccaaataaactgctgttgcagtccaggcaagagaggatgctgtgtttgaccagagccttggggtgaagatggaaaatattttagaaggaaaatggaccgaacttgctggcaattaggatgtcaggggtgatgtggcctgtaagtggtgacatttatgaggatggggaagactgcagggttggaggatgcagttttgagggaaaacatcgaaagatctgttttgggcatatgacatttgggatgctaattggacatccaaagtgaagatcttgactcacgcctgtaatcccagcactttgggaggccgaggcaggcagatcacttgaggtcaggagctcaagaccagcctggccaacatggcaaaatcctgtctctgctaaaaattcaaaaaaaattagctgggcgtggtggctcacacctgtaatcccagctactctggaggctgaggcaggagaatcacttgaacccaggaggtggaggttccagttagctgagatcatgccactgcactccagcctgggtgacagagcaacactctgtccacaccccccacctccccaaaaagtgaagatcttaagttgggcgcatccttttcaagagagaagtcagggcccaggataagacatttgggagtcatctgattattaatgttattgaaggccatgagcatgaacatgatcactttggggagtgaggactaaatcctgagatgctccaatggaggcatgttatcaactgaattgtgcctaccccaaaagaaaaacatatgttgaagtcctaacccctgttcctgtgaatgtgactttattttggaataaggtctttgaagatgtaaccaagtcaatttgaggtattagggtggaccctaatccaatataactggtgtccttaaaagaagaggacagaagccaggtgcggtggctcacacctgtaatcccagcactttgggaggccaaggtgtgtgggtcacctgaggtcaggagttcaagaccagcctggccaacatggtgaaatcccatctctactaatacaaaaattagctgggtgtggtggcgcatgactgtaatcctagctactcgggaggctgaggcaggagaatcacttgaatctgggaggtagaagttgcggtgagccgagatcatgccattgcactccagcctgggcgacaagagcaaaactccttctcaaaaaagaagaaggagaaggagaagaagaagaagaagagacacacacacagggaagaagcctgtgggaagctggaggcagaggttggagtgatgcagctgcaagtccaggaacgccaaggatgaaacagccgccaccaggagctaggaagacacaaaggaggattctacacagggtctcagagggagtaggaccctgtcgacaccttgattttttttttttttttttttttgagacggagtctggctctttcacccaggctgcagtgcagtggctgatctcggctcactgcaagctccgcctcccgggttcgcgccattctcctgcctcagcctccccagtagctgggactacaggcgcccgccaccgcgccaggctaattttttgtatttttagtagagacggggtttcaccgtgtgagccaggatggtctcgatctcctgacctcgtgatccacccgccttggcctcccaaagtgctgggattacaggcgtgagccaccgcgcccagccgacaccttgattttagacttctgacctccagacctgtgagagaagaaattcctgtagtctcaagccatgcagttcatggtactttgttagggcaggccccaggacactaaaacagggagacacggaggatctggcacaacagagaaggtctactctgacagccccaactcaccggcccggtagacccggctttgtgatggagtccctggctggccccccaggatgggcaggatccgaaaggtccaggtccctgggttccgaggtggaaggggcaccacggctgaccgctcctgaggccccaggatgagcagggagacccagtccctgtaggtggaagtcctgcccagagcaggcccatctggccatgcctggatctcaaaactgctgatcagggccccgcgctccacatcccaagtcagcacggctgcatctctggctctctgaagcctccacgaggatatggagggtcctagagggatgtgggggtggctggattcttgggtgccagaggggagagggaagggggctggggggctgggctcctgggtctgagggggagggggctgggggcctggactcttgggtctgagggaggagggggtgggggcctggactcctggatctgagggtggaaggggctggtgacctggactcctgggtctgagggaagaggggctggggctagacccttgggtctgagggaggaggggctgaggcctggactccagggtctgagggaggagaggctgggggcctggatccgaggtctgagggaggagaggtctggggcctgaacttctgggtctgagggctggagcggctggggacgtggacttcagggttttttgaaataacgtggctcaccaatgagggtgatctggtcaccgccagcacccagcgccccactgcacagcacggagtaatttcccaggtcccaatccaggctgaagttgccgatgtggagtttccgcccatcttgactgagccgcaggcgactcccgcctcctggagccaggggcctcccttcccgggcccaggatgcccgtgagggtgggggacaaccagaggcctccagtgccacctctgcctcccccaaccgtgtctctgccaccagcggatgcagcagcacctctcggggggcctctgccggtgggagaagtccagttaagaaagtcaagaccttaccttggattcaaagaacagatcctatgccctactttaaatcagatggtggtaagcccccacgctttggccacctgagaaagaactgccaatttactcactcattagctcattcattcattcattcatttattatctgatttcctcatcaaacacttattgaacacataccataggcgcaggccctgtactgggaaactcatattattttcagctattctttcttctttattattattattattttgtagcaataataattacaagactgggtcttgccacactgcccaggctggtcttgaactcctagactcaagcaatcctcccgcccccagctaccaaagtgctgcgattattgcgcccggccttgttactttttaaaatatcactgctttatctctctgaacacgtgtgaaagtgatggccttcttcctgtgtccagaaaaatacccccatccctgcaccccgccaccatgaggtataggaaaatctttgtcccttttctagtttgaagacagtgaagtcctgcctctttcttggactaaggacgtaccccataccccttcagaattttcgaaggaccaaagaaaaagtctccctcctcctcgagaaacagcaaaaaagccccgcgccctctcacccggcgtgactgtgcaggtacgcgtggccaccaggtggcgagcaaggcaggtgatggggacgccgctgagccgggggtgggcggggacggccgccagcagcacagaggacactggcccggcgcggatgccttcggggagaccctggaactgcagggaggcagcaggggccccgccgggccacgagcagcggaagcggaggctgcggtccccgggacccccttcaactgagcactgtggggccccggggggcaggtctgcggagagaagggagagaatgaagatggagtccctttctcatttcttctccagccccgcctccccgcgcggtgactccacccttcttcactagccccaccccataggcgctcacactccccacttttcctgcgatcccgttcccttttcccattaacttcctcgctaagtgggtagcccgcagccctgctgactgcccaactttcttaagaaaactgcatcttcacacaatgatatttctcttcccaaacgtaactcagccccttcctttccagctccacccacttctgccaggttacttcgccccctcctggattgcactccgagaagcctccccttttcccagatatctccgcccttccttgtggaccccttcccctttctaagacaattctgcccgctttctaaatgacctcgcccctttccctggtgactccgccccccttgccaggtaacttctccctttgctgatcccacttaagcaaattagttctttccttttctaactcccactctttgccatttaactccgcttgtcgactttgtcgagtgttccatgcccaggaatgtccgccctctcagtgctgggccggcccgtcagtcctggtcatccctgccactctatttggctccttcccttatcctctttctggccccgcctcttatcctaggtgtctccgcccctccgcgctggcccgccccaccacgggtatcccagctccttcttggtgacccgccctcccgctggccctgccccacccaccggtatgctgctcctccttgctggccccgcccctttcctctagccccgccctcgttctggccccgcccctctcccaggcattcccctactcccgctccagcctctcacccgccactgtaaggttgagcagcgagcggcggcggcggccggtacgcgggttcgccgccaggcaggcgtaggtgcctgcgtggcccggtccgaccgcgggcagcaggaggcgcgaccccgcgggcaccgcggcctcggccgggtccgccaggctccacgtgatgtcggcgggcggccgcgaggcggcggcgcagcgcaaggtcacgttactgcccgcggtgacaaagcgggcaggcgcggcgtcgcggtccgaggagaccgtgatggtcggcgggtccgggccgtctggagggaggaggggtcgggaccgcgagtgtcagggtcacctgggacgccgctaggactcccggagactgggtccccagcccgcttctccccaaggaccccctgtccccgacccgaggcatcccccactcacagaagacgctgacgtcggcggcagcctccctgtggccgaaggggctgcggacgcggcaagtgtaccgggcgtggtcgctgcgcacagggcgcacgatgagcagctggtcgccctctgagcgcatccggggcgtctcggctccctccgattccgccgcctccagggcgcgtccgtcccggctccagctcagctccccgcgacctggcccccaccccaggcagcgcagccggagctcggccgccccctcctctgtctctggagccttgggctgaaccgacagctggggtaggggctctgggagagggagaatgggctcaggacccacccagtcctggagcccatctttggtccccttagagggaaccccagccgctgctccctctaagcccctggagtctcagcccccatccctctcctctcataaacctatgagtttgagcccccagacacctcctctccgggacccaggagttcgccagaagaggctcctagcctcctcctcctccctcagacctgggagttcaggctcccaggagtctccatcccaggtccacctttgctcagacacccctgccttgacctctagctctttttctcccttcctcaacccagaagtcctcttctcctatccagggaccccacagcaccgtgacttgcccaaagcctggcagagcagagcagcccctgccgcctgcacgccggacgccagggcccacttaccatacacacccaccgtgaactcgtgagtctgctgggagacccctgcccggatgacctcagccgtgtagacccctgcatcgtccagctgggcagaggcgagctccagaaccccccgggcctggtcaaatcgcaggtggtctcggtgagcagggtccaggctgatcagaggtgcccctggccccaggcccccagctgccagcacctttgagccccggcgccagaccaccagagaggtggggggcccagggttggggattgggactagggggagccggatggtggtccccaccagcacagcgagtgggccccccacctgctggggaaagcttgcagctgagtgggtctctgcagaaaatttggattcagggctctgggcagagagtttaagatccatatcatccggggagaattttgaatctggggcctcaacagacagtttggtatgggagacttgagtagaaatgtttgaagctggggtcttaacagtgaaggaaggcttggggtctttggcaggaacttgaggatccgaaatatcaggaaatacttcagaaccaggggtttcagagaagggggaaaccgggctcaaatcttggccctcagcagaaacatttgaccagaaggacccagacatgttggaactcagggcctcaggaaaccagctggaatcagagattccagcagaggcttttgaatccaggaactgatctggaactttccagctgggaggtttgatggagggaacttccacacccagcccctgggaagagctctttgagtctgaagagaaggcagaggagaagttggtttgctgaagtccagaagaggctctgagggtgaggatccctaccaaggaggctgcagagaagagaggaaggcattgggggaggctgctgagggagactgacagggaagggactgagcagggaacttacccaggagtaggaagagtggcagagcctgtgggttgtccatggtgctggcctcactgaaaggacactggagagagacccaggactgcacccatccctcccgggtcagacgagtccaacaggactggtagcttagcttcctgggaggggaagggagccagacccagagggaggtgccaagatcctcaaccccagtgtggtggctgagctgcccacctcatcccactctcttcattagctggtcccatctgcagagaggcccagcctgatccctgccctccccacccccagggggaagctggagaaaacattcccagctaaaaatgtgggagcaaatttgtgagacaaagccaggaagacttcctggaggagggtgaggtgacctttccgagagccccacctctgatggccacagcttcagagcaggcttcctcctccccagcctcctggctccttccactctgtcttgcctgcagcctcagatacatctgaccctgctcctcctctgctccaaaccctcccacggctctctgttgccctcagaaccaagtctccaggtgctatctcctgccagggcctctatcctgagaccagagctgcatttccgcatccccgaggccctcacatggcctgtgtcccgctaaactcagactctttcctctaacccaaacttcctcacacctccaggatggcttcactgtcttcgcaaatgctggagaacattcccacctcctccctccctgtcaccactgtcgatctgagtccaaccctcctccccctagttctcactggccaggctctgtcttctcttcctgccccgtctccctcctctgcccagtctcctccattccctgccagggtccttctatacccagagctgaacctgcctccccctgctcacagccctcccctggctccccagtgccctctggagacatccaaggttcaaagcaaactcatgcacagcccccactcaagcacttgaacatcctgccattcttatcctgcccgcccatctcacctcccagtcctctacctggaatgctctctcccactctccacctccctccaacctggctaaaccacaacttgtccttcaggtctcaccttattaagaaccataattaccacttaatttgagccaggaactacgctaaatgtttcctatgcactatcaggctgaacacttctaaacaccctataagctgagtgtcattatactcactttgcaggccaggggacttaggctcagagaggtcaagggacctgcaggaggttgcacagccagagggagaagctggacttgggaccaggatggtcagaccattgactccttctgatagcttttcccaccatcccatgtggagcttagggcctctgctcagctcccagtcctctaagcttaccctggcccagttctcaccagtaataatactggtaatatatatatattttgagatggagtctcgttctgtcacccagtgagtgcctcagctcactgcaggctccatctcccgggttcaagtgattctcccgtctcagcctctgcagcagctgggagtataggtgtgcatcaccacaccaggctaatttttgttatttttaggagagatggggttttgccatgttggccaggcttatcatgaactcctgacctcaagtgatctgcccgcctcagcctcccagtgttgggattacaggcgtgagccaccgtgcccggactaatattggtaataatatatatttagcattttttgcatagcaggtgtggttatgggggtgctacataaattaacctttcaaaactccatggagtagatgatgtagcttaaagagggctgcaaatttgagcgtcctcctgttaagatgcggggtctatgtcccctctgcttggatctgagtagctgtgtgactgctggaccaagacgtggaagtggccctgtgccaggatctgcatctaggccggcatatgccactttctgtatcataggacactccctcatggaatccagccgccacactgcgaggatcagcagccccatggaggggaatcatggcccctggtcagcagccccagccagcttgctggctatgtgggtgagccctcttggaagtcaatcccctggccccatttgaggcacatgaactgatcctgaactggatccaggaatggatccagtgggatttgacccagggccctgggacccagaacccatacccttaacctctacatgatgctgttactattttcatctgcagatgaggcaactgaaactcaaaataggaaggaactcacccaagatctagctggcaaaggtaagagtgagcatatgaaatcaatatatctgactctatcagaaggccagaggaatggaacacaattttttaaataaaaaattagtccaggcgctgtggctcacgcttgtaatcccagcactttgagaggctgaggcgggcggatcacttgaggtcaggagttcaagacagcctgggcaacatggtgaaaccccgtctctactaaaagtacaaaaattagccgggtgtggtggtgcaagcctgggcaacagagcgagactctgtctcaaaaaacataattaaaaaaaaattaacctgactgtagacccaggctgttcattgcaacgctaagttttgattctctgtggcttgtctgtctcacaccagaaccacagcttctggcctcattctctcctgtgtccctgctgagactggggacacaagagagaatgagtgtcctgcaaacatcgtggataaaagcccttcttctcacccacctcactgatatttgtgttccaacactcaacttggaagtcatctccctgggaaatctctgaccccaccggctgggccaggccaggtcccccagttgggttcccaagggcccagtgtgcctccacgtctagcatacttcaccccgaattacagctgcctttgtcctcattgtcccccgcatcaatacagaggctcctcatgggcagggactggatccacagggcctggcacacaaaagactcaagtaaatgttgaatgaaccaaataatgggtctctaggaaataagttaacagagatagatgttgagagtcagttttattgccatctctgggaggggctcaaatccgcccaatctccttcagcttggccaccaggtcctcagtggtctccaccttgacgccggccgtgcgctggggcgggtcctccacactgatcacagagagcttggaggtcaggtccacacccaggtccccaggcttgatcacctcgatcttcttcttcttggctttctgcacatgggaagccattgttcacagggctgtggaactcctgccacccttcctgccacctccttcccatgggtgccaggcctgcagaccagtcccatgggctgaaccctctggacccacccactggccaggacacgcgaaacttctcacagggccacacctggtgtggacaactcctgctggctaggaggccctgggaggcccaactactgcagcagtcctcctttaggtaaccaaatcaggaagcccttcactggctgcaacagagtggcaaacccatccttttggtagtaatgactcagtggacttttggttgagatggcatgctgaaggctcccaataggctgagatgatgcactgaaccctccctatagactgagatgatgcgctgaaccctccctataggctgagatgatgcgctgaaccctccctataggctgagatgatgcgctgaaccctccctataggctgagatgatgcgctgaaccctccctataggctgagatgatgcgctgaaccctccctataggctgagatgatgcgctgaaccctccctatagactgagatgatgcgcagaaccctccctataggctgagatgatgcgctgaaccctccctataggctgagatgatgcgctgaaccctccctataggctgagatgatgcgctgaaccctgcctatagactgagatgatgcgctgaaccctccctataggctgagatgatgcgcagaaccctccctataggttgagatgatgcgctgaaccctccctatagactgagatgatgtgctgaaccctccctatagactgagatgatgcgcagaaccctccctataggttgagatgatgcgctgaaccctccctataggctgagatgatgcgctgaaccctccctataggctgagatgatgtagtgaacactctgtaatggctgaaatgactcattgaaccctccccattagttgagatgatccagtgaaccctccctgttggctgagatgaatattctctattggcggagatgacccactaaactgttaatattggccaagatgacccagcgaacccatctactggccatgatgattagtgaactctacctgttagccaagagaccccatgcacccttcctagttaactaagatgatctacatggtaacttcacattggcaaaaattaccaaggggaccctccctaatgaacctagatgacccagtgaacttgttccactggctggaatgacaaagggaacaccttctgctgcccagcgaaggctttctactggcctagataccagcaagccctccctgctagccaaagcagcccccatgaactctcagtattggcagagatgacccagcaaactctctctatcagccaaactccaggtgacggcttcctgtgcacgagacctcctttggatccttccctccccacgtgcgaccaccggggggcactgggctggcaatgtgcttgccacccccaggccctcagtgcccgctggccaggggctcaccatgatgttgggcagcgtggcgtagcggggctcgttgagcctcaggtcagctgtcaccacagctggcagcttcaggcgcagggtctccaggcccccatcgatctcccgctccactttcaacttgtccccctccagcgtcacctgggaggcgaatgtgccctggggagggacagtgtaggaggagagtgggtgaggctaattcaggtccgacccgagcagtctgcttatgccactactgagtacacgcatggactagtgaatgaatgagggagcgaacaatgcagggtcccatgaggtttagaatcgagcttgtacacctgggagagggtctttttcctttccctgagagccacggtgtatgtcctgatgtcccatgtcctgatgctgccagtgaggcctccctgccttcctgacagggaacatgtactgagtgctgagccctgtgctaagcaactgatgtatcaagtcatcgaatcctcgcaggaactttatgaggtaaatgttattatccccactttacagatgagagaaactgaggcagcaagatgctgagttacacgcccactgccacccacagctggtaaatccaaaagctgacaatctggctcccaacggccccccgtgaggcccctccgctgggcagacaacagaactgtgtgtgtccacaccagtccttaaaccaccttctgggaccccgtcctctagccaggtccctttgcctctcagtcctgaatcaacatttcctcccctggtaactgatgccacctacactcctctttgtctaacgacctttgtccctgtccacttattaactggacacatttttcaggtcttagtgtgaacatcacctcccttcattcacaacctcctcctagtgcccttatgaacctgcccctggagacacactgtgaacacgaccagtgaagcaccagcttgggtgggctcatattctgccagggaagacaaccagtcaccagggaaaaacacacacacacaaatgagatcatttccaatcagaaggaataagaagaaaataagacacatgatatgagagcaagaagggcgcacgttggagaagctagtcagacagtggtaaatgctttgaagataaaacaggataatggttttgaatgtgttgtcccatccagtagccactggctgcgtgtggctgtccagccagtgcagctgaggaatgaatttttacattttatttaaatttaaatactgataatttggccaggcgcagtggttcatgcctgtaatcccagcactttgaggggccaaggcgggtggatcacttgaggtcaggagttcaagaccagcctggccaacatggcgaaaccctgtctctactaaaaatacaaaaattatccaggtatggtgatgcacgcttgtaatccgatctactcgggaggctgaggcaggagaatcgcttaaattcgggaggcggaggctgcagtgagccaagatcgcgccactgcactccagtctggggacagaacaagactccacctcaaaaaaataaaaataaataaatactgagaattcaagacacattatcatgattgtggtgatgatttcatggatgtaacacatatcaaaacttaaattttggagggctgaggtgagcagcttgcttgagcccaggagttaaagaccagcttgggcaacatagtgagacccccatctctatctaaataaaagagtttaagaaaagcaaacttaacaaattgtgcaacttagatatgtgcggtttattgtaggtaaataactcaacgaagctgtttaaaaaaaaaacaaaaacaaacaaacaaacaaacaaaaaaacacagatacccaatgcagttactggaaatgcagttactagaaaacttttaagtttgttttgaacaacttgggtgtgtaaatctatttcaactgtcatctttaggaatgtgtttctcatagaaatttagcacctgaattgagatgtgctgtaaatataaaatacatgctgaattttgaagatttagtacaaagaaaatccaaaaaacgtaaaatacagatggtccctgacttatgatggtttgaattaagatttttcagttttccgatgatgtgacagtgataaacattcagtagaaaccatactgccagtgtccgtacaaccattccgtttttttagttccagtacagtatttgataaattacatgggatatttagcactttattataaaatgtgctttatgttagattattttaccccactgtaggctaacgttaagtgttgtgacatgtttaaggtaggctgggctcagctatgatatttggtagattaagaatattaaatgcattctctcagttataatattttcaatttatgatggatttatcaggacgtaaccccattgcttgtagagcatatgtatcttaatatttttatgttgattacatgttaaaataatattttagatataatggggtgaaataaaatataattttgtctgtttctttttacttttttatgtagctgtgaaaaattttaaatttgtctatgtgccttgcttctttttttttttttcttttgagacagggtttccctctttcacctaggctggagtacagtggtatgatcacagctcactgcagtcttgacctcctgaactcaagggatcctcccacctcagcctcctgaggctggtactacaggcatgtgccatcacacccagctaacttttcttttttggtagagatggggtctaactatgttgccaaggctggtctcgaactcctgggctcaagtaatcctcccaccgtggcctcccaaagtgctaggactacaggtgtgagccactgtgccaagcctgcatttcttttttctttttttgagacggagcctccctctgttgccaggctggagtgcagtggcgtgcgatcttgcctcactgtaacctccgcctcccaagttcaagcaattctccctcagccccctgagtagctgagactacaggcgcacgccaccacacccagctaatttttaaatttttagtggagacgaggtttcaacatgttgaccaggctggtctcaaactcctcctgacctcaagtaatccacctgcctcggcctcccaaagtgctgggattacaggcatgactcaccatgcctggccccagcctgcatttctattggactggcagagatggggactggggaacctagagttgagcgggtgggcatgagtatttcacgtaggatggcaaggaaggcccctttgaagaggtgatacctcagcagagacctcaaggaggggaacaagaaagccatgaggcaatccgagggaacagtgttccaggaggagagaacagcaaatgcaaaggccttgaggcagaaatgaagtttgagggatgagggcctggccctcagcaggtgctccccactccagtctcacctgtggccagtcaagaaatccagctgtcatctgccctgtctggttacagtcatcatcgatggcctgaatggggagagacagaagactgtatgacaatcagtggagctcatggaccattcaggcctctgtctagaacaggggttggcaaactttttctttcttttttttctttttgagacggagtcttgctctgtcacccaggctggagtgcaatggtacaatcttggctcactgcaacctccgcctcttgggttcaagcaattctcctgcctcagcctcctgagtagctgggattacaggcacccaacaccacgcccagctaatttttgtattttcagtagagacagggtttcaacatgttggccaggctggtcttgaactgctgacctcagatgatcccccaaagctctgggattacaggcatgagtcaccgcagccagtcgggttggcaaaccttttctatggtggaacagatgtagtaaatatctcaggctctgcaggtcatacggtctctgtcacggtgactcagcgctgctgttgtagcacacaggcagccataaataatatgtaaatgaatgtatgtggtgatgttccaataaagctttatttacaaatcagaggtcgctctgggccatagttcactgacttttggtctagaacgatcccctcacttgggcccagagataagcagccacttgtccagggacatgtggggccacctggcatccctgtcgtcaagtctctgccctctgtataaagcctctcaggagtcccaccctatgtggcccctgggcagctgcatgaacagggtctgggccagcaaggacattctagccccagcccagtgattggttcagggaggggcacatgactcaagctgcaccaaagaagagtcagccctgggagtttgctggggcccttgggaaagatgctcctttctttctgctggggtcactgggctggtgggatctgagcctggagatgcagacagtgaagacaaggtagaggggagcctacagctcatatgtgaccctggatcaagctgtgcctgaagcccctgatttacgtgagataataaattcgctttctggcttaagccagtttgagttgtgaatctgcttcctagaacaaacagcatcctgaccagttcatccggcatttccccagctggaggccctggccccaggaactgtccctggcccaggacaggtaggacatcggagtctgagaacgaccagcaaatgcagggggctgcaaaggccatgcttccagcacctcggcctctgcagccccacccaggccctgcctttttggcctgttctccgggtaggcccttcggccacagttgactgatctgtactctgatgcccctgctgttgataatctctctctgttttcttctgactttctcagggctgggcaggacacccagtgacctacctggacccatcagcctcctctttgtcccagaactgacctggccctgggatccccatctctctccgggggccccagctctacctgagcctgctgtgctctgctgtctccgtgctctgcttgacataccttgcagtctttggccttccttctcagcctcatccctaattccctgcctcttctcactcccatctgcctgtggctcttctgacgtccctcttctgccccttccctggttgaggccatgaggtttgccctcaaatgagatgagctacccctgagcagaggtggtgcccgagggtctcctgggggaacagatgagctccatgtacccctatctcagtggggagcaccagtgtggcagggaaggttctggtcgggtcctcacccagccctaacctccttccctaactcctggcctccaatttcccattccagtccattctcaaagcccaggggggctctttctgcacctagtgctgatcccacccctcttctgctcatagaactcccatagctccccagtgccctccaaaattctcaagtctttgtttcaagcccaggcctgtctcctgaacctgcatcgatgtctcctgggctcttcacactccccttgtaggatcctcctctaacctcctgttcttcctgggtttcctacctgtgttaccaaggcagacccaggcactgtccttgcctcctccctgccctccctccccatgctaagcccagtctctcctgccacatcatgtctctgctctgtcctgtcacctttggctgaggcctcattctcccccatgtgaccatcacctcggcctcccagcctctaaactcacccaaaaggatctttcttctttttttctttttgagacagagtctcgctctgctcccaggcaggagtgcagtggtgcctggagtgcagtggtgcgatcttgtatcactgcaacctccgcctcccaggttccagtgattctcatgcctcagcctcccaagtagctgggattacaggcaggtgataccacacccggctaatttttatatttttagaagagatggggtttcaccatgttggccacgctaatctcaaactctcgacctcaagtgatccactggcctcggcctcccaaagtgctgagattacaggcgtaaaccaccgtgcctggcccaagaggatctttctaacacccagagggactctgtcctccctgctcaaactctctgtcagaagggtcagcaaagtcccaagctgctcagcctggagtggtgaatgccctgggcctggccagctgctgtctcaccccgtatctccaccaccctcctcccgagcagggatgagcaagggggcacagggagggctgaccacagctacctgtttgcccagcagcaccaggtccaccttctccttctctgccagcttggccaggacccgagccacctgcaggggacccaagcgttctgcttctgctgggggcacctccacgtggatacctcggtctgcacccatggccagggcggtacgaatcgtctcctgccaaggacagaggggcttgacttggctgctatcctcagggggacctaggagtctggctcgcagcccctccttcctcagacccaggagtccagggccccatcccctccttcctcagacccaggagtccaggcccccatcccctccttcctcagacccaggagtccgggcccccatcccctccttcctcagacccaggagtccgggcccccatcccctccttcctcagacccaggagtccgggcccccatcccctccttcctcagacccaggagtccgggcccccatcccctccttcctcagacccaggagtccgggcccccatcccctccttcctcagacccaggagtccgggcccccatcccctccttcttcagacccaggagtccaggcccccatcccctccttcctcagacccaggaatccaggctatcagcccatcctccctcagacccaggggtccagacttccagcctcctcctccctcagacccaggagtccaggtcccagcccctccttcctcagacccaggagtccagggccccatcccctccttcctcagacccaggaatccaggcccccatccccttcttcctcagacccaggagtccagggccccatcccctccttcctcagacccaagagtccaggcccccagcccctccttcctcagacccaggagtccaggcccccatccccttcttcctcagacccaggaatccaggctatcagcccatcctccctcagacccaggggtccagacttccagcctcctcctccctcagacccaggagtccaggtcccagcccctcctccgtcagacccaggagtccagccccctccccaagaccttcatcacctggcactgtgcaggcccacagctgacggcgatgacctccttcaccagcttcttctccttgagccgcacagcctcctccaccgcgatctcacagaaggggttcatggagtgcttcacaccatccgtgaccacaccggtcctgtcaggcttcactcggatctgcccagcaggaggggaaggggtggggtcaggaggaaacaggcaagaaggtgggggcctcagcgccaaccctctcccaggctggatgaggacaacgacagcctggaaaggggcagggccttgtccggggtcacacagctccagggacagaactgggttagagtttgtaggcaggggcaggtcaccctgtctccttctctcatccagccattcctgggtaccagggacatctgacttgatcatccctactgttgtcactgctcctctcaggcctgaaagagtgtttctcaaatttacagtatttatggtaacccacagtgagaggtacattttactgtatctccaagtgtatataaatacataatacactgatacataaatacaaatgaggagaagaaaaggaaaaaccagttaggtagacagttaagggtggtcctcagaggagcagcctgcctgaaaaatcacagctacaggcaacaatagagcagcctggggaaaactcaagctgcccagcacagaagccttttgttctttgcgtgactgacaggctcccaggaaaagttccctccccttttcaggcacgtacatggtggtctctgtgggaacttgcacggggaggggcggagcttacctaaaacaaacccacggttacagaaacaagagaagcggagctttgtgcttgcctaaagacgtacccacaactacatagataacggagagttatgcagatagctttacagataagatactcaaacagctacagagatgaaaggagtttcttataaaagcttttggtgtcttttgctgtgcagaagctctttagtttaaccatcagagtgaacaggcaacctacagaatgggagaaaatttttgcagcctactcatctgacaaatggctaatatccagaatctacaatgaactcaaacaaatgtacaagaaaaaaacaaacaaccccatcaaaaagtgggcgaaggatatgaatagacacttctcaaaagaagacatttatgcagccaaaaaacacatgaaaaatgctcatcatcactggccatcagagaaatgcaaatcaaaatcacaatgagataccgtctcacaccagttagaacggcgatcattaaaaagtcaggaaagaacaggtgctggagaggatgtggagaaaaaggaacacttttacactgttggtgggactgtaaactagttcaaccattgtggaagtcggtgtggtgattcctcagggatctagaactagaaataccatttgacccagccatcctattactgggtatatacccaaaggattataaatcatgctgctataaagacacatgcacacatatgtttattgcggcactattcacaatagtaaagacttggaaccaacccaaatgtccaacaatgatagactggattaagaaaatgtggcacatatacaccatggaatactatgcagccataaacaatgatgagttcatgtcctttgtagggacatggatgaagctggaaaccatcattctcagcaaactatcgcaaggacagaaaaccaaacaacgcatgttctcactcataggtgggaattgaacaatgagaacacatggacacaggaaggggaacatcacacaccggggactgtcgtggggtggggggaggggggagggatagcattaggagatatacctaatgctaaaggacgagttactgggtgcagcacaccaacatggcacatataaacacatgtaacaaacctgtacgttgtgcacatgtatcctaaaacttaaagtataataataaaaaataaataaataaataattttttaaaaaaaaagcttttggaatcaactgtaaaaatggcaacccgcttgggcttccctctcctctgtggagagctttcttcttttgcttattaaactttcgctccaacctcaccttttgggtggtctatgctctttaattctcttggttgtgaaacgagctcggataacaccttagacaacgtgaccagtgaccctgacctatttcacaaatgccactgcagtgtaagggtcagtgaccaatactgaccctgcctacacacacaccatactctgacattttctaccctttttcggaaaaatgccagccctctgcctggatgtcatgatcacacatggtcacaacctaatttggaaaacaccagcatgaaagacctctttgctaaacagacaagggaggtaagggaggtgggtggcaaaccccacccatttgcttctgcacatcatttttgtctctcctgggccccactgtgtgcctggctctgagctggatcctggggacaccatcatgtgccagggagagaggcttccggtgtagaccagggtgtagcgtgaaccactaaccactctcctattagtttctctcggctgccgtaacaaatcaccatatatttggtggcttagaatcttacagctctggaggccagaagtccaaagtcagtgtcaccagggtgagaccaaggggtctgcaggccccgggaggaacacgtttcttgcctcctccagcttctgctgacactccctggcttgtggctgcatcgctttatcttcaatgccagcatcctcagctctgtcttcacgtggccttctcctctctctgcgtgtctagtctccctctgtctctctcttataaggactcttgagatggcattcagggcccacctaaataatccaggataatgcccccatctcaagatgcttaatttaatcacatctgcaaagaccctgtttctaatttcttttttttttttttttagatgggctctcgctctgtcgcccaggctggagtacagtggtgaaatctcggctcactgcaacctctgcctcccgggttcaagcaatttgcctgcctcagcctcccaagtagctgggattacaggcatgcatcaccacgcctggctaatttttgtatttttagtagagacagggtttcaccatgttggccaggctggtcttgaactcctgacctcaggtgatctgctctcctcggcctcccaaagtgctgggattacaggcataagccaacatggccagcctgcaaagaccctgtttctaagtgatttccccttctcaggtgccagggattgaaacctggctgttttggagggctattttatttcttggcccaccacaatcctttttttctttctttctttttttttttttttttgagatggagtcttgctctgttgtccaggatggagagcagtggcatgatctcagctcattgcaacctctgcctccccagttcaagcgattctcctgcctcagcctcctgagtagctgtgattacaggtgcccaccaccacgcccagctaattttttgtatttttaatagagacagggtttcactatgttggccaggctggtctcgaactcccgatctctggtgatccacccacctcggcctctcaaaggcaggggattacaggcgtgagccaccgctcctggcccaacctgagtttttataaggtcattctggattcttggtggagaaaattggaaaaggatgagaggaagtggggagagagctgggtggctgtttgtcaccaaagtgagaggtgacagtggctcagacagctgtgacagcagagacagatgcaagaggtttctggaggtgcaactgacaggccatggttcgtgatgggaagatgacaccaaaaaggggcttccagtcagtacatcagccagagccgggaagacggcgagtttggtttggggcacaaatttttaaaaagcctccagggacatccacagaagccttgctagggagctgccccatttggcctggagcctgccctcttcctcttctcccatgtggccgccacccagggcttggccagagcagatctcgggtggcagctgagcctggtgaggacactgggatgctcttgctatttccctgcccctttttctctggggctgtgggtgtaactgttcctcccacaggcaggacagaatccgagatgagaaggtgggacccataaggggcttcccactctggctgtgcctcatggagagggtaacattaaaagatggaggactgagaccgggcgcagtggctcctgtctgtaatcccagaaatttgggaggccaaggtgggaggatcacttgtgcccaggagttggatactagcctgggcaacaggttctacaaacaacaacaacaaaaacaaaaacagctgggcgtggtggctcatgcctgtaatcccagcactttgggaggccaaggtgggcggatcacctgaggtcaagagttcaagaccagcctggccaacatggcaaaaccccatctctactaaaaataaaaataaaataaaaaattagccgggcatggtagtgcacgcctgtaattgcagctactcagaggctggggcagggagaattgcttgaacccaggaggtggaggttgtaatgagccaagattgcgccacggcactccagcctgggcgacagagcaagactccgcctcaaaacaaacaaacaaacaacaacaaaaaaaaaaaaaaaaaaacagccaggtatggtggcacacacctgtagtcccagctactcaggaggctgaggcgggaggatcacctgagcccaggaggtcaagggtgcagtgagccgtgatcatgccactacatgtaacctgggtgacagagcaagacctcatctcaaaaaagaaaaagaaaaagaaaaaggagaaagaggagaaggagctggaagaggagaggaaagagaaagaactgttattttcatctctctcgttgcccaggctggagtgcagaggtgccaccttgccttactgcaacctccacctcccgggctcaggtgatcctcccacttcagcctccccagtagctgggaccacaggcgggcaccatcatgccgggctaatttttttttttttactttttgtagagaaaggatttccccgtgtttcccaggctggtctggaactcctggcctaaagtgatccgcctgcttcagcctaccaaagtgatgggattacaggtgtgagtcgcagtgcctggccttttttcttaaaaaaaaaaacacaacataggagttgcccctttaagacagaaaagaacctcatccacccatcagtaagaggccccaagcttcttgctgtgagtcagggaggcttctgaagggcctcaagccacatcttgctcttgctctggcagaactcccagccctaagctcctgattcccaggctcctgactcctgaggagaaagggtaagaactttccagacacacacacacacacgcacgcacacacacctgaggaaacaaactagctcatcttctcaattaagcttgagttgattttaagcttcaaaaacagtttagttatattacataagtcaggaaacaatggtagggctgaaaaatgatagcttgtttgttttttaaataatgatggctcatgcctgtaatcccagcaccttaggagactgaggaaggaggatcactggagcccaggatttcaagaccagcctgggcaacatagagagacttcatctctaccaaaaaacaaaattagcaggtcatggtggcgtgcacctgtagtcccagctactgaggaggctgaggtgggaggacggcttgaacccaggagggtcgaggctgcagcgagctgtgactgtaccactctagcctgggtgacagagctagaccttgtctcaaaaagaaaaaaaaaaagttttataattgaggtaaatcattcagcattaagtgctggctttctcttaaagagacgacatatccaccaatatcaaaaacagcctcaaagctgggcgtggcggctcacacctgtaatcccagcactttgtggggctgaggtgggtggatcacttgtggtcaggagttcgagaccagcctggccaacatggtaaaaccccatctctactaaaaatacaaaaattagtcgagcgttttagcacatgcctgtaattccagctagttgggaggctgagggaggagaatcacttgaacccgggaggtggaggttgcagtgagcagggatcacatcaatgcactccagcctgggtgacagaccagattctatctcaaaaaaaaaaaaagaaaagaaaaaaaaaatttttttaaaagcagcactgacccatgcagacaacgagtcaagggttttatatgcattaactcgtttgaccatcctagtagcctgtgaggttggttactgccattacctctcattttacagatgaggcaactgaggcacagagaggccaagtaccttggccagggccactgagcatggaagtggcaggaccacgggtctaaccccaaatctgtcttgggaactgtgagactctgaaagaggctacgtgtgcccacggtgttaggagagccagtcttcctatttgttgtccactgcaggcaagagggattttcttctcttctcttttctttctctctttctctctctctctctctctctctttctctttctttttgatacagagtcttgttctgttgcccaggctggggtgcagtagtatgatcttggctcactgcaaactccaccttctgggttcaagcgattctcctgcctcagcctccccagtagctgggactacaggcgcctgccaccacgcctggctaattttttgtatttttagtagagacaaggtctcaccgtgttagccaggatggtctcaatctcctaaccttgtgatccacccgcctcagcctcccaaagtgctgagattacacgtgtgggccaccgcgcccggcccacgcctggctaatttttttatttttagtagagatggggtttcgtcatgttggccaggctggtctcgaactcctgacctcaggtgatccgcccacctcggcctcccaaaatgctggaattacaggtgtgagccaccacgcccggcccaagagggattttataaagtgattttcgacagctcttcctgaacccctgacacagctcaaggacttgtgtggttctgtcctctaggcttttctgtcaagcgagtccctgggcacgtgctagggcactcagcaagcaggacagccaaggccagggagccaccccagtgacagatcactaactcggcggggggcagacagagaactcgtccctgaggtgacatgtgagccccacgtgtgccctgtcagacaaggtggccttgctgagagcaggaggggcaagtgcgtggagcccaaagaggaaaacctgaagaaacaccaggcgctcccagacgagagggtgtggctggtcggggttgggccccgagatggaaacacgttttctgggcctggagtttctatcctgtggggtcatctctaagaaaatgaatcccagataatgaatacaaaattgcccagcctctcctgggtttttttttttttttttttttttgtgagacggagtctccctctgtcacccaggctggagtgcagtggcacgatctcggttcactgcaacctccgcctccctggttcaagcgattcttctgcctcagccccccgagtagctgggactacgggcacgcgccgccatgcccagctaatttttgtatttttagtagagacagagtttcactctgttggctaggatggtcttgaactcctgacctcgtgatccacccacctcagcctcccaaagtgtgtgtttacaggcgtgagccaccaggcccagcctttctcctggggtcttgaaagaggccctgaaggttaagcttcatcagcttcctgtaaaatgtgcccctgaacaggacagggtgttactgagttgccaaatacctattaaaatgttagatacacgcacatacccagaaacatacacacagccggacacacatacacacacacacacacacacacacacacacacacacacacacgaatacactctgagcacagcatttgttatgttttgaataaatgactaactaaacatccattactactactcccaataaaaacacttattgcagctggtcacagtggctcacacctgtaatcccagcacgttgggaggctgaggcgggtggattacctgaggtcaggaggtctagaccagcctggctaacatagcaaaacctcgtttctactaaaaatacaaaaattagccaggcgtggtggctcacacgtgtaatcccagctactcaggaggctgaggcagagttgcttgaacctgggaagtggaggttccagtgagctgagatcatgccactgcactccagcctgggcaacagagatagactccgtctcaaaaaataaaacaaaacaaaccactgtgtgccaggcactgttccaagggcttatttaattttcattacaactcaataaagtagatagtaccatcatccccattgtacagagtagaaaaatgaggcttagagtggtgaagcaatttcctcaaggtcacacagcaggaagtggacgcaggcgctgggcttggagtctgaggtctgcactattctagtagtgaacccactgtctcaggaagcagtgaccacatcaaactgtctcccccacacctggagctcaaattccagaaggggcgacagacaccagagcaatcaataagtaaacaacactgtggattacaaagtgtccacaccagcttccctctggggacaagctgggctctcagagggtgcccctgctcccacctccttcatggagaatgtgagtcactccctccactcagttaggttggctccttgaactttcatctctagcaaacatactttcctctccctttctagttgctaagtataggggaaaacacagcaaaacacagggacctggggcctgtgattttaaggaggcaagcagggaagtcctcccagagaaggtgatgtttgaaaaggaggtgaaagaggtcagggagtgagcacgtgattctgggaacagaggtggatcagacatggcccctctctgcagggagctaccagcctggggatgatggagtagggcagtggggaacatggggtaaacagaggatcccaatccagtctggcgagggctgatggaagcaaatctagggactgcagaagcccccagggatataccaaggcaacctgagggtgtagggtcaggggcttcctggaggaggcgatgccagggagaatcactaaattattattattattattttgagactgagtctagctctgtcacccaggctggagtacagggacacaatcctggctcactgcaacctctgcctcccaggttcaagcgattctcctgcctcagcctcccgagtagctgggactacagatacgtgccaccatgcctggctaatttttttatttttaggagagatggggtttcaccatgttggcctggctggtctcaaactcctgacctcaactgatccactcgcctcagcctcacaaagtgcagggattagaggtgtgagccaccgcgcctggccgagaatcactagattttgatataatccatgagttggagttgggcaggacaaaggacagaaagcagaggtaggagggtggtgctggaagaaggcatggaacgggcaagccgcggcctggtctgtcaggacaggaggagcaggtcacagtggcagaagcacaaagggtaagggagggtccaaggagggaagtggacggctgaagcagaccatgaagaggaggctggaccacaaagcatcccaaatgccaggcagaggggctgcgactctgtcctgagggtgctggggagccacaggcaggctgggagcaggggagagcagggtgagctctgggtgcagaaaggcccctaaggctgggtagaggtgggctgagagggagagactgggagtgagggaggacccgggtgagggtccaggtgagacaatgacaccaagagacaatagggcaagaagggtggggggtggagaactgacagctttgggagaagggaaagagggtgggacagtacccaggtctaatctggtgtttaggaagctggcagggtctgaatcatttatttgttctgaaaaggacatcaacagacacatccagtgagacaggatgtaatgcagggagccctggggcactgcgggaggggaaggcagcaccctctggaaaggacagtagctgattcaacgcggccttcacgcttcccctctgttctctccctgagcacaccagagacatccatgtgccaggctctgtgctgagtgatgctgggaccagagctgagtcaaacgtgggcctgcaccatgggggagacggatccaatcccagacatgccaggcgtggaaggccagggctgggatggagagaagaggcccagggagctgtaggactccaaagatgtgacagtaacgaacagtcagagcagggaggaaaccaagtgttgggtcccaggaccccaagaggaatgtgtctcaaaagggctacaggtgacatccctgtcatgtgctgccagaggcatcattaggacagggggcattgagggagatgggagagcagagtctagagccagacttgcccggggtttcgatcgtaactctgccacttactggctgggagatctgacaggcctcagtttcctcatctatccaatggaattaataatacaaagggtcggccaggcacggtggctcacacctgtaatcccagcactttggggggccgaggcaggcgggtggatcacctgaggtctggagtttgagaccagcctgaccaacatggtgaaaccccatctctactaaaaatacaaaaaattagccaggtgtggtggcacatgcctgtaatcccagctacctgggaggctgaggtaggagaattgcttgaactcgggaggctgaggttgcagtgagccaagactgcgccattgcactccagcctgggcaaaaagagcaaaactccgtctcaaaaaataaaaataaataataaataatacaaagggtactgaaaggactgaatgggttaatctctgcaaaggacttggaacgatgcctgccacgtaagtacccgctaaatgctggctgctatcatcactgacactttcatgctcaagtctggctcctgtaccctcttccccagcccactccctaagcaggcaggggcagtatcagtgtcaactttgtgaccctggttttgcccaccctgaggcctccagggtgccaggccctgcgctaggtaatgctggggacacggaggtaagtccccaggctgatgggaaggacagacatggacagacagtcaccatcttcagtccagttcaggccaagcattgagagaaacgggcctgagagaccgtgtctgattcacctctgtccacaccagcttccctctggggacaacaagccaggcgctgagagcaccctcccccacctctttcatggagaatgtgagctacccccagctcagtcaggttggctccttgaactttcatctctagcaaacacacttctctctccctagctagagcctcctggctcaccctgtggctatggagggtggaaagcagcttctggggccccacaggaccctgtctgactccctctatagcacatttcgggtaatataagagtacaatggtaagtaatgcagcctagtgggtgaaagcagtcagaggaacctggatagaactctcggctctgcccttctctagctgggtgacctctctgtgcctcagtttctccgtgcattaaacagggaccgtgacttcttccagtgggtaagaaatagagaaagcaactcactctgaacagttatcaagagagtgaatccagaacgagggaaaagagaacatggccgtgaccccggagggatcggatgttagaacttcactcttggatttttgccctcaggtgactttgacgtttgggggttaaagcggcagaggtcgggggttacgagaagacccccacccagtgtgcgctcgtggccccggaagcacacggctgcgggactcagggatgtgggagaggggggcccgatcaccttcacggcgtagtcgatgaccctcttgacagctacgagcacgcgcagctccgccatcttcccgccgcagccacttacagggtcagcccgcaccctcagcggctcagtccagaagccccaccacccccgccccccgcgcccctctctgcgcctgcgcgcagcacggtcagccagtcaaccgctgcagagcccgcctccccgacagaggaccaatcgagaggccggaaggaagggaggtgtggcaagcaatgcaaaccaatgggaagcggatctcggggagcgagcgggacctggagagagaaggaaaggcctggcggagagggcagggcagagaactaggggaaaggtcgtgcactggagggaagcgcgcccggagtttatagatcctcccggtcctataaacacttcccggtatccccggatctgctctccctctccagatcccccacttcttcccggcctctccaagtcgcggtactcgtattcccacgcctctgaatcctcgcgcgtcggtctctccactctctccatccccgtgttccctgtcccttccatatccgtatcctcccctgtccgtgtctctacttcacctccatgtcgtccccacagcctctccacaccctctccaaaggcccacgtcccctcctggccccgcccctcccacatgtccctgttcccatcccaatccatggagacttgtgtctccatgtctgtgtctccctgtctccacgttccctatgagttcatgtccttatgtcttccctgagcctctatgcaaccccgtgcctgcgtccccacgacccgcagaaaagcacgcggagccgcagcgctaaaaaaagccgttcctttattctgccccaggcaggctgcagtcacagacacacggggaatccactgatggcgtcggtgctctgcatgatcatgtctgccagcagaaagcagaagcctggggggacgggggtgcggagcagggagaggaaggtgggccctggggcggatggccgggagggccccggggactggggtttggggctccaagggggtctctgccgggtctgcgggagtcgttagtgtgttggggagtccccgagaggtccccggggtttcctgggagggcagctggggagcctctggggtgagggtcttctgggcagtctcctccaccctcttcccgctgtccagtttacccgcgagaattgagaagggtaaggccagccacccagaaaaataggaccaagagaagaagacgttgttcttccacgcattcttcacggtgtagcctatcaaggcggtcagcagcagcagtcctgggccccgcccagccgcaagatgagctagctgggcctggtgggggctgcacccaggccacgccccttcagacccgcccccttctatcagaccacgcctatcgcctctcagcccgcccctggcccaggccccttcctgctcctcccgctctgaactctgtctcgagccccgcccacctctctcggcttcttccagccctgcccctcggatcctggccgagtacctcaagcccctcccctggcgaccaggcccctccatcacccagggcccgcccctgcctgcccgcctggggcggtctgcagtctcaccgccgaggaagaggaaggcgctcgtggtctggccccgcagcgactcgccctcgtcgcaccgaatccgcagtcccatcaccatgcccaccacgccgacacccaccgccagcaccatgcacgccacagtcaccgccagcgtggctggggagagcgggcgcatcagcccccgcgggcgccgccccagtcactacgggttcggccgcaaccggaagctctcccgtctcctgcccccaacccggtgtgtggccaggagccgagctccaccgaccgggagtcaggcgtttggattgagacttggaggtcacatcaggacctgcggttactgccgctaccaggacggggagggggtcggggacaagcccacaagtcgaggggcggggttcgtggcggcctcggccgacaagggacagctgcaactgagcccggggtggaaggggtgggcgtctcgccatgggcccagctgtgtgtcccgagccctgggggtctgaaatgccctctgacatctgggcgggcggagcctcactctggcaggggatgctggagcagatgccgtggttgcattcctgccacaggccactgtggccctcttgttggcgggtccagtagttggtggccgtggagagcaccatgaggacgttggccacgaggctgagcagaatgcccccactctggaggctccgcttcacccccatgccactgaggctgcagccgggggccacaagggcaggatgggcccaggcctttcctaccccgaggcccccagctgaggagcccgcttcctccacactcctcccctggtactcctgcctgaggtccctgcttctggggacctggagacccccctccctcaacaaccctgcctgaggatccacaacctcctccctccagacctcgttccccttactggagaccttgagacttcccctgagaggcctctgagaccttcaccacaggctttgctgtgaggaacctgtcttcccagagacctcccccgacagccgaacgccctttcagcccagcctgttcaatgtcctccccagacacccctccacacaggcccacctaagtgactcacacccagtgccctagggctccttagacacagagcccagagagacggggggagggaggctgggtctctgtgaggccaggggttccagaaccccctcccccagtggctgtttaaagggataatcactccccccaccaccatcgcatacacccccgcagctctcaactgagtgactgcttagattcagatctcagctttgggggccgttacatgataggccgagtccttcttttatcattattatcattattattttttgagatggagtcttgctctgtcacccaggctggagcgcagtggcacgatctcggctcactgcaacctccacctcctgggttcaagcaattcttctgcctcagcctcacaagtagctgggactgcaggcgcacaccaccacatctggctaatttttgtatttttagtagagacggggtttcaccatattggccaggctggtcttggactcctgaccttgtgatctgcctgcctcagcctcccaaagtgctgggattacaggcgtgagccatctctctctcccaggctggagtgcagtggcaccatcacagctcactgcagccttgaactcctgggctcaaggaaacctcctgcctcggcctcctgagtagctgggactacaggcatgtgccaccacacctggctaattttcttaagattttttgtagagatggggtcttgctatgttgcccaatctgatctcaaactcttgggctcaagcgatcctcctaccttggcctcccaaaatgctgacattatggatgtgagccaccactcccagccctttcttagaaacttctctttcccttggccgggtgcgcagtggctcacgcctgtaatcccagcactttaggaggccgaggcgggcagatcacctgaagtcaggggtttgagacaagcctgaccaacatggcaaaaccccgtctctactaaaaatacaaaaattagccaggctagccgggggtgatggcaggtgcctataatcccagctactggggatgcgaggcaggagaatcacttgaacccgggaggtggaggttgcagttagctgagatcgcgccattgcattctagcctgggcgacagagcaagactccatctcaaaaaaaaaaaaaaaaagacaaaattagccaggtatggtggcgcacgcctgtaatcccagctactcaagaggctgagggaggagaattgcttgaacccgggaggcagaggttgcagtgagccaagatcacaccactgcactccagcctgggtgatagaacaagactccgtctcaaaaaaaaaaaacaaccttctcttcccttgacattctaggcaccgcagaagctctccaggtccccagctgtctgactgcagacttctgctcctctgccttctccccttcacttgtaaatctgggtatcccttgaagctccaccctgcactctcttgccaggcaagcctcctcacggccaaagtttcagtgctccttaatgctccatccaaaactccatctccaacccaaggtctctcccctgagcctgactcaagttctcacctgctcctggctgcccctcagggccttaatagtcaaccatattccaactgagcttagtgtcttccaccatattagggatggccctgccatcccatccagttcatcgagccagacccttgggcactgtcctcaccttcttcttgcccttcaccctgaaaagccttgggtccctaagtcctgctcctcctgcccctgaatctgtctggctcattccctcctttcctggtcccaggtcaggcctcatcatgtcccacctattgcattgccaagttcctccctcaccttctggcctcccctccatgtctacaggggggtctttctggcacccagagctgacactgtccctcccctgcccacaatttttctcccaactccccatcatgttcaagagaaagtccagcatgacattagaggccacagcccccacctgcctctccctcttcattttccatcccccgccccccacattctatatcctgaccctaaattaccgatcttcatccccacaagactcctgacttttctgcacgttcatctttgggcccctctgcctggatattacctttccctggcccttaagaagctcctaaatgttctctctccagaaaagtcgtctccatccctccacaatatggtcagtctttttccggcattctccctgcactgggactgctgtctggcctgtattaactgcttctggtctgtaagtgcctcctccccaccaccccacagactgagcccctgctgggcagggcctgggtctgacccgtgccagtgtccccagcatggggaaatgtgcaaagagaactgactgagtgcaaggaagggctgagttctggcaagggggacaaaatcagagagggagagagaaggaaagagagccagctaaagggagaaagacacagggaggaagaaaagtgctggagaaggggagacatagacacgggttggagcctgtgtccacacgggccgggcactcgtactgggcaggagcgccctgcaggctggtcggcctggtgggccctcaccttcccttggtgcccagctcctaccatggagctggcagacagttggcttatgtcttggcagaattaatctcaaaataaccagattccagccaaattttgttgaatgaatgaagaaacaagaggaggggctggggaagggctggaagggcgggcagatgtgggaccagactttcccgaggctccagatgaggcctttggaatacaacgctcaaaactcatcttgccgctcttgccttctgctcacaaggtttcatagccaggacggggaccgccacagtgagcacccaggctcagggcacctggggagccagaaagagtttaagcacttgcccctgccctctgtcctcagggaccccaactggaccctcccaaagctccccagggcagtgggcaggatagtcacctgtacagagcaagaggatagctgagacccagcccaggtagaaggaccaggagaagaaggtctggatctgggggtgtggaggctggtcccaccgctcgctggtgtacaccgccatggccaccaccatggagatggctggggacaaggacaagagagatggctcagctcctcggcaggaattcgctggctcgcgatgccccagtccagtccagagtccttacctgcagcaaaggctgcggtggttgagacaagcgggccgtggcctggggggaacagtgaggggaagcaggacaggaccaggaagctcacggacaccagggcccacagaacagccataatgctgaaggtctgcgtcacgtggatgtagcctgatcgggagaagaccactgagcacccatccccgctggcaacccctctgtaggacacccattccccttacctgatatgatgtccccatgccctgttggccagaggcccgagtgagctgagtgggtgggacccacagcctcaaaccagaaatcggtgctcaaagcaatcaggcagaacatcaggcccagggagccccccagcagggccagggaccggcagagctccatggggataagctcagggcttctgggtcctggaggaggaagaggctgctgatcagactcttgaatctcagagagaaggaggctgtgcacccagactcctgggtccttagagcccaagaaagagagaacagcaagcagttggggcagtgaggggtcctgcgctttgtcacatgaggctggtttggtttcacacagttcccggtagcttttcacataccctcccttcctggattgcacaggcaacgtcctccctcccctccctggggtccagttccccgcttagtgtgtgatgggggagggcactgagggtgtcagatcatcagtggtttgggcggtggtttagtacttgcctctgtcacagattctacaactcccacccatggaaccttcaacaccaagtcggggcttcctggaagaggtgagagagagaggcttgggggccctgaggtgggaggaagccaatcaggctagggtgtacattaagggggagggcagatgtggctggaggggacagctggggatgtgtcatgctttcctgtgggttatgcagtcttccattctgggagaggaagtccccaagtctagggtctctactgaaggaggggacttgggagttagaactcctggggcttaaggaggaaggagctgggggcctgaactccaggtcctgagggaggaagaggcgggcaggagctcagaatcctgggccccagtttggagcatatgccaagggcaggcaaacagcagagaatcacaattctgaaaggtttgcagagagtcagacatacccacatcctcatctgattaatgagttcagtggcatccctgcttgggtgggggctccagcctggtggcctttatcaccaggatcggggggcctagggggtgttgggggacataaggattttggtttagggttctccagccccccaaacgctagcctcttccatccacaccatcaggtcctggcaacacctcatctacgagcaggtataaggtgacggtaccacagcccaggtagaaggcccaggaaaacttgacctctgtgaaacggtgatatggttagggtttgtgtccctacccaaatcgcaccttgaattgtgtccccataatcctcacgtgtctaggtagagaccaggtggaggtaattgaatcatggggccggcttcccccatgctgttcttgtgatagtgagtgagttttcacaagatatggtgtttttttaaggggctcttcctgccttcgcttggccttcttcctgccactctgtgaagacagtggcttgcttccccttcaccttccaccatgattgtaagtttcctgaggcctccccagccatgctgaactgtgaatcaaataaacctctttcctttataaattacccagtctcaggcatttgttgttgttgttgttgttgtttgagacagagtctcactcttgtcactcaggctggagggcagtggcaaaatctcggctcactgcaatctccacctcccaggttcaagcagttctcctgcttcagcctcccaagtagctgggattacaggtgcccgccaccacacccagctaatttttgtatttttagtagatttcaggtttagtagattttcgggttttcaccatgttggacaggctggtctttaactcctgacctcaggtgatctgcccaccttggcctcccaaagtgttgggattacaggtgtgagccaccacgcccggccaggcagttatttatagcagtgtgagaatagactaatacatagggagtagtctggaagaggacctctgtcttggagatgaactggtccagcagtcccaggacagctggcaaatgtggagaatgggaaatgacctggaagactggttcctctcctttattggagagactcagatcggcagcccccatccttcactcagatctgcaccactctgagaacacatttatgagcacaggctcccagaggtggcagaggccatgagcaggccaggtctccggaaaacctgccatggtgtgcagtgagtagcaggtcagagcacacagcctatctatctgtgaccctgaccccctcccaaacccaaagccatccttaaccccaaacccaactccatccccaaactcagtatcaagcccagttccaaccacaaattcaacccatccctatccccaaagttaaccctattcccattcctgaacacaactccatacccaatcccatccctattcgtaatctccaccctagctccaacccccatcctcaaatagaactccattctcagtcccaactacacactcaaccccatcccccgattcgcccccatccccaaacctaacgtcattctaattcccaaactcaacatcatccttattcccagttccaacccttatacccttcccaccctcaaatctaactccattctcattctgaaaccccaccctatctccaaaccaaacccctctccattattaaccccagcccctactccaaacccaaccccatcctcttcctgaaacttgaccctattctcattcccatcccaaccctttttttttttttgagatggagtctcactctgtcacccaggctggagtacagtggcatgatcttggctcactgcaacctccgcctcctgggtttaagtgattcctgtgcctcagcctcctgagtagctggggttatggttgtacgccaccacaccaggctaattttttttttttttttgtatttttagtagaaatggggttttgccatgttggccaggctggtcttgaactcctgacctcaggtgatccacctgcctcagcctcccacagtgctgagattacaggagtgagccactgcgcccagccactgtcttttcattcttctctgcaacctctataattcatacctaactccgaccattttcattctcctttcacctccaggtccaagcctgtaacctcatttctcatctccccaagtgggtcccactaccaccaccatcacacccatgcatgcatgcatacacagaggtgacctgtacctggctccagtgagtctctgcacatgtaggtatcacaggctgatcacaggcccaggccctctgacagacaccacaagccagtaagagcgggtgagtgaaggtcatcttttttttttttttttttttttttttttgagacgcagtttcacttttgttgctcaggctggagtgcaatggcatgatcggggctcacagcaacctctgcctcccaggttcaagagatcctcctgcctcagcctcctaagtaactaggattacaggcatgcgccaccatgcccggctgactttctatttttagtagagacggggtttctccacgttggtcaggctggtctcgaactcctgacctcaggtgatccacctgcttcagcctcccaaagtgctggaattacaggcgtgagtgaccgcacccagccagccaagaccatctcttaagagcacaaaggcaaggcagctggggccttgaagacagaattgctcgcaggatctccagcagctttctcaaccagatgtggtctgtggttgccagaggaaaaccccaggcctccttctgaagcttttcctgagagctctgtgaaaggaaaatcttggggccccaaaattactgagctaaaggggaaagtcaggctgggaacagctcagggcaaacctgcctctcattctattcaaagtcatccctctgctcactgagatcgatgcatatctgattgcctcctttggaaaggcttatcagaaactcaaaagaggccatgcctgtaatcccagcactttaggaggcctaagcaggtggatcacctgaggttatgagttcaaaaccagcctggccaacatggtgaaaccccatctctactaaaaatacaaaaattagccgggcatggtggtgcacgcctgtagtctcagactcaggagactgaggtaggagaatcacttgaacccaggaggtggaggttgcagtaagccgagattgtgccactgcactctagcctgggcaacagagttagactccatctaggaaaaaagaaactcaaagaatgcaacaatttgtctctcacctacctgtaacgtggaatccccctccctgctttgagttgtccccaccttcctggatgcaccaatgtacttcttacatctattgattgatatgtcatgtctccctaaaatgtatagaaccaagctgtgccccgaccaccttgggcacatgtcgtcaggacatcctgaggctgtgtcacgggcgcatgtcctcaactttggcaaaataaactttctattgttcttttttttgagatggaatctcgctctgttgcccaggctggagtgcagtggcacgatctcggctcactgcaagctccgcctcccgggttcacgccattctcctgcctcagcctcctgagtagctgtgactacatggcaaaataaactttctaaattaactgagacctgtctcagattttcggggttcacagctcacgtcgcctgcttggccacttggttctcttaggtctctgtcagtcttgtctaagcactgtcagtttttttgaatcacccaggtctcttccaactttctccagccccttccaacctctcccgggcttgaaagctcctcagtagcccccatctgccacggaagaccccaaaaaattagctgggagtggtggcgtgcacctgtaattccagctactcgggaggctgaggcaggagaatcgcttgaacccgggagtcagaagttgcagtgagccaagatcgcaccaccgtactccagcctgggtgacagagtgagactccatctcaaaaaaaataaaataaaataaaatttaaaaagactaatcctcaattaacctacgttctattaaagaaatgaatgctaatggtaaacagttattatggaaggcatcatcatttctattgaggtgcactctagtcataatatttaatggctattataatgataaaaagatattaaatctcagtatcattagagtacatttcaataaataatactttatgtaagtcaataaacagcacttactttatgtaagtcagttggcctgaataaagatttattgttcaacaaatgttcttttgagtgattaccatgtgccaggtgctgtctttgaggatttacaggaaaccaaaagcagacacaggccagctggggtggctcacgcatgtgatcccagcacttcgggaggccaaggtgggaggatcacttgagaccagtagacagagaccagtctaggcaacataaggagaccccatctctacaaaaaattaaaaaattacccaggcatagtgggtggtgcatgcctgtagtcttagctgctcaggaggctgaggtgggaggctcagttgagcctgggaggtggaggctgcagtgagctgtgatcacgccactgcattgtagcctgggcaagagtgagaccctgtctcaaaaaaaaaaaaaaaaaaaaaaagccaacattgaatcccaaagttgttggcttgagtagctggataaaaatggggttgtttggccgggcgtggtggctcacacctgtaatcccagcactttgggaggccgaggcgggcggatcacgaggtcaggagtttgagactagcctggccaacatggtgaaaccccgtctccactaaaaatacaaaaattagctgggcgtggtggcagacgcctgtaatcccagctacttgggaggctgaggcaggagaatcacttgaacccaggaggggaggcggaggttgcagtgagccgagattgcaccactgcactccagcctgggcaacagggcgagactccatctcaaaaaaacaaataagtaaaataaaaaatggggttgccatttcctaagatggggaagaccatgggaggaacacataggctgtgtgtgagatcaggaacttatttttggatatgtgagattggagatgcctcttcttttcaagtgggaatgttgagtaagtaagttgagcaggtaagttggagtcctgagtctggagtcataattatatcattattattgctagagtaagcccctataaatatgattactagaataagtctcggcaaatatttctatttaaataggcctcaataaattattagagaaatcttcaattgtcattattattagagaaaacctctataaatacagtatttttatttgaggaggccccagtaaatattattttagggaataagcctctataaacataacatttattagcatagctgtagtaaatagtctgattagaatcagccttatgaaatagtcttatgatagacatcagtaaatctcatggcagttagcaaccatttattttctttttctttttcttttttattttgagacatagtcttactctcgctcaggctggagtgcagtggtgctatcacagctcactgcaacctccgtctcctcggactccagcgaccctcccacctcagcctcctgagtagctgggacaggcacacaccaacatgcccagctaatttttttttttttttttttttttgtagagatggggttttctcatgttgcctgggggactcctgggcttgagcaatccacctgccttggttttccaaagtgctgggattaccggtgtgagacaccacacccagccagcatcaattaatagaatgaattactaatgagtgaatgaagagaagatcacggtcatgaatggtgtgtgaagagcaggtgccggaggtaaggctcagggttctggtgtttcctttgaagggacgcatcaggggaggagagaggaggctggggagagccaactggaggcggggtgggcagggagttttttcagagatcttttcatttgtccgattatcctacacatccatatcctggaagttgaactgtggtgagctcctggacacggactgttgattcatctctgttcccctccgtgcagaaactgagaaggtcaggcctccataatacagcacccctgggccgggtgcagtggctcacgcctgtaatcccagcactttgggaggcagaggtgggtggatcatctgaagtcaggaattcgagaccagcctggccaacatggtgaaaccccatctctactaaaaatacaaaaagtaaccaggagtggtagtgggcccctgtaatcccagctacttgggaagctgaggcaggaaaatcacttgaacccaggaggcagaggttgcggtgagctgagatcgcaccattgcaccccagcctgggcaacaaaggcgaaactccgtctcaaaacaatgaagacaacaaccacaagaaaaacacacaaaaaagcacccctgcccacacccaccacccttacagctgtttctccccatcctagtccctcaagtattaacactttagtagtttcacatcagttttattaggccccagaaagttgctctaatggatagtccatttttctaacaacctgccaggcagacggggacttgagtcttctcagctccctcccatgggccctattcttcctccttccagcctaggaccaggagtcagcctccccccacaaacccacagtccagaactgagccccctcattcccctaggaaccaggatttcaggcctctagaccctcctcctcctcttcagtggcctcactttaacttccagatgaagttgggggacacatttgggctcagcggggtgtagacaggcgccggcattcatgcacccggtaggcgcacatgtagaaaatccctgcatgagaagaagttcaaattcaccccctcaaacctcccccagctccatttccaccccaagagagcccaacaccctactctctttctccctgggtatccccgaccccagactccataggcctggagtcttcctcctgacccagtgctgtgggactcatgtgggacaccctgtcatcttccactctatctgctgcccactctgccccaggcactgaccttcccaccccttgcccccagtacctgcgaagaacgtcatgagcactgccacccagcccaggatgtaggaccaggaaaagcgccagtccccaaagcggcggcccaggaagctgacggtgactccagtgtagatggccaaggccaacacgacgaaaagggctggggagagagggcgggaggatgcaggtgggactaaggctgggtgtgattttggaggtgggcagagagctgatgatgggggtgggaactaagattggggaaaggggtggaaatgggttgggggtggggataggagtgaggataggggttgagttgaaattaggggtaaagatgattgggggataggtttgggatggggttggacacgcttgtgttttataatgtaattggccattgtctctggttcctgggagggagaaacaatatttggaacttcctgagtaataggagggtctttgttattcttgagcctcttgggcccaacctgagtttatggtaatgagatgagatgactcagggttgggtgtggttgtcagaaaaaccaaccaggtcaggcacagtgactcatgcgtgtcatcccaacactttgggaggctgagtagggtggatcacttgaggtcaggagatcaagatcagcctggtcaacatggtgaaaccccgtctctactaaaaatacaataaaaaaaaattagctgggtgtggtggtgggtgcctgtaatcccagctactcaggaggctgaggcaggagaatcacttgaacccgggaggggaggtggaggttgcagtgagctgagatcgagccactacactccagcctgggtgacagagtgagactccatctcaaaaaaggagaacaaaaaagaaagaaagaaagaccgaccatgatatgttgaggctctgaaccacttgatatcagggaagaaaggaagttggaaactgcattccatcaatgaccaacgattcaatcagtcatgcctattttacaagactccaataaaacctctggacactgaagctcagtggcgctccctattggtgaaaacatctgtgtgctgggagggtgatccctggctccacaggaagaaggcttggaagctctgcattttgggctctcctagactctgccctctgtgtctcttcatttgcttggacctgagttgtgtcctctataaggaaactataactgtaagtatagcactttcctgcattctatgagttattccagcaatttttgttgttgttattgttgttgttgtttttgttgagacagagtctcgctctgtcgcccaggctggagtgcagtggcacaatcccagctcactgcaagctccgcctcctgagttcatgccattctcctgcctcagcctcccaagtagctgggaccacaggcgcccgacaccacgcctggctaattttgttttgtatttttagtagagatggggtttcgccatgttggccaggctagtctcaaactcctgacctagtgatccacctgcctcggcctcccaaagtgctggaattacgggcgtgagccatcgcacccggcctccagcaaatttttgaatctgagtgggtcttgggaacctcctagtttgtagccagtggatcaaaagcatgggtggcccaggcaccctgcttgcagcttgtagctgaggtggaagcagtcttgctagggactgtggtcttaacctgtggagtcaaacacaaattttaggtgattcatgccagaactgaactgtagtacaccagctagtgtcagaatagactggaactagaaatagtcatgaggttggttttgagtgtggggatgggattagggtggggtggggttgagtgtgaggaggagtaaggggtgagaatggtgttgaggggtggggacagattggggtttgagatgagagcgaggagaggggtagggagagggtgggcttactcacttgaggaaaaaaacatgatgccagcagagaagggccgggagatgcgggagaaggtaggctgatgagcgaaggccatgatgcccatgatgatgccggagatggcgcatagggcagacaggatcatgaaggcccgggtggcattccagtatgctgtgggagcaccccatggtcattcccacacctcccctgctctaagtgagagatgctgctacctctgagatgaaaatgccttgcccctttccatatccctaacccagctcatccttcccttctttgcaaatgccctcttcttcacctggcaaactcctactcatcctccaaagcacagctcccgtgacccatcctctaggaagcatctccccacccctcagtcatcatcttcacccacggctaagggttgtgactctctttgtctgtctccccctccagcctgattgctccttgaagacaggcggtgggttggttctgtgtcataaacacccccaccacacatttggtttgcattctggccttgggaaatgtttgttgaatgaatgaatgaatgaatgctgattccttatattttcctactaattactattctctctcacatttctttttttttcttttctttttttttttttttttttttttttgagaccgagtcttcctctgccacccaggctgaagtgctgtggcacaatctcagctcactgcagcctccacctctgaggttcaaacgattctccttcctcagggtcccgagtagctgggactacaggtgcgcaccaccatgcccggataatttttgtatttttagtagagacggcattttgccatgttggccaggctggtctcaaactcctggccccaagtgatccacctgccttggcctcccaaagtgctgagattacaggtgtgagccactgcgcccagcctactctttcatttattttatactacttgcttatatctgaaaatgtcctatttacttgtttttaacttatttataatgtctgtctctcctcagtaaatccttagctctcaaggacaagcaccttgctttctcattcaccactgtgtccccagcacctacacctggtgcataataggtgcccaataaatgcgtgaaatgaattaatgttgagcaccggggccattcttctcttgtgctttgcccagggatggcccctcaggaaagataataataatctcttcatcctttagcaacggctaactatatgccaggctcgctacccaggtgtgatgttgtttattcctccagagccctactctataagtaccatttttatgcttctttttcaagtgaagaaatggaggcccagagaggtaaagtgacttgcccgaagtctcataattagaaacagggctggagtcagaatccaagctccaaggcccacgctcctaactgcttggctattctgtctgctggagcacctgggaaatggtgcacctcaaaccttgcatcttgccattgaaaagtaaaaagtctaggatctttgtaaaacccagtcttctgccttgtagaagcctcggtgagagaaattcctggctgtttctccatggattttatgggttatgcctttctgtcccccgcctcaaatgtttatgttgaaattgtaactagtgccttagaatggtaacttatttggcaatagagtctttgcaaatataattagttaagacgagatcatgctagagtagggtggggctctaatccaaagactgggctgggtgtggtggctcctgcccagtgtaatcccagcactttgggaagccaaggcaggtggatcacctgaggtcaggagtttgagaccagcctagccaaaatggagaaaccctgtctctactaaaaatacaaaaattagccaggcttggtggtgggcacctgtaatcccagctactcaggaggctgaggcaggagaatcacttgaacccgggaggtggaggttgcagtgagccaagatcattccactgccctccagcctgggtggcagagcgagactccaactcaaaaacaaaacaaaacataaaacaaagactgccgtccttataaaaagaggaatctggacacagacatgcttttaggaaaaatgccatgtgtgaggaaggtagaaattggggtgatgcatctccaaaccaagaaacaccaaagattcccagaaaatcaccagaagccagggagggagggacatggaacagattctccctcacagccctcagaaggaactgattttgcccacatcttcatctcggcctccagaactgtgagacaacacgtttctgttgttcaagccacccagtctgtggggcttttttatggcatccctagcacactaattcaggctggtcacagcggctcaggcctggaatcccagcactttgggaggccgaggcaggaggattgcttgaggccaggagggtttctttttgattatttattttatcttattattattttttgagacagggtcttgctctgtcacccaggctggagtgcagtggctctatcttagctcactgcagccttaaacttctgggctcaagtgatcctcccacttcagccttctgagcagctggggccacgggagcacaccaccacgcccagctaattttttattttttgttgagatggggtctccttacgttgcacaggctggtctcaaacacctaggctcaagtgatcctcctacctcagcctcccgaagtgctgggattccaggctgagccaccacgtccatctgaagccgggagtttgaaacaagcctgggcaatacagtgagatgctgtctctacaaaaatcaaatcaaatgaaataatgaggccaagttcggtggctcatgcctataatcccagcactttgggaggccgaggcgggtggatcacctgaggtcaggagttcgagaccagcctggccaacatggtcaaatcctgtctctactaaaatacaaaaattagccaggcatggttttgggcgcctgtaatcccagctactcgggaggctgaggcaaggagaattgcttgaacccaggaggcagaggttacagtgagccgagatagtgccattgcactctggcaggggtgacagagcgagactctgtctgaaacaaaacaaaacaaaacaaaaacaaacaaacgaaaaaacgaaagaccttcaccaaggctccctgtctcctgcatccctggcagagataagacagagaggtggctcagggctgtccctcggggaattcccagcccgaagcaggagaaatgtagaagtgtcacaaatgagacagccagaaaggagaaggatgtgtggagtcaggcagagcggactctgaagctgatggcccaaggcaagtcttttcacttctccctgcctcagtctacctctccagcaaacaggcatcgtcctgcctctctctcagggctggctccgggagagatgagtgggcgaagtctcccatgcctgtcacgtccggcactcagtgacgcttagctcttcttctcagctactcaagaggatgtttgaattttgagatcaaatctcatgtctcactcttacatacaattgaactgcccgtagtgttgttggggatggaagtgagtttatccatgtaaagtgcttagaatagcacatagggcatagtaagcactcaatcaatgccagttattattattactgttactagtagtaatacacaatatattatatattattaattaatttttatttattttttagacagagtcttcgtctgttgtccaggctggagtgcagtggtgccatctgggcccactgcagtctccgcctcccaggttcaagcgattttcctgcctcagcctcctgagtagctgggattacaggtgctcaccaccatgcctggctaatttttgtatttttagtagagaccgggtttcaccttttttgccaggctaatcttgaactcctgacctcaggtgatccgcccacctcagcctcccgaagtgctgggattacagacgtgagccaccacgcctggccaaatttattaatatgttatataataagtgtgcaatataatatactctacattattaatttattatataatatattgtataatatatacattattaatttattatataatgtcatgacatatactatttattagataatgaatgtgtaatataatggattctacatcatatataatatattacatgtgcattacttatataatatgtagcatattatatacaatatattatgtattagtaatttattatataatagaggtgcatgtataatacactatactgtatattattgtctatatgtagttatatataatacatcataaattatatgtaataatataaattgcatatattacacataatatagtatacattaacttaatatattatagatgctatgcagcaagcaatatactatatatctctatgtatctctctatctatggcctggcacattataagtaggcaaaaatactttatgctactttatgcagtatttagcaaattcagtatccaccagtacctaacatagttcttggtccatagtacatatttagaaaatgctgtttcgtgacactagccccaattgctgtgcatgacacctctgaagcgtcaggaaatgccacctctcccaacttaaccttcaaaccagcaccccgtgaaactgcagctagaaaacaaccctgtagtcccagttctgccccctccatgctgagtgaccttgggttgctccctttccctctttgagccgcagagttctccatctggaatacaggtgtccttgggccccgaggtccgccctgctctttccccaggcgcggcctggaccctggccggggggctcaccgatgctgtctgtctgcaggtagcacttgttgcccaggcagtaccgccacaggccctggtgggcgaaggaccctgacagccggtactgcatccagtggtctgttgccatggccaccaccaggaggatggtccccacccaggcacagaacaggccaccacccatgaagctgtacatggtgatctgtggggaaggggagagatgggattgggagctgaattcccgggacttgaagggaggaactggggggagagagggctcaggagtgggatgccaagtgcttgggagaaggagatggagacctagacgcctgggtcctgggcgaggaggggactggagcccggactcctgggtctgagggaggaggatggtagggatcctggaaagacaacagggagagcggggctgggttctgggaagaaaaggccgggggcctggacttccaggttctgagcaaggaataggctggaggcctagcttcctgagtcctaggtgagaaggggcccaggagcctggattcctgggtggtgggtaaggaaggggctaggggctagggggtaggacaccaggtcctgggagaagaaggagctgggaccctagactcctgggacttggggaagagggggctacaggtctcacgcctggtgcctacctgagtggcagagcctgcccgagccctccttctgccacggcccctctgtgcagactgagctgagcctggtcactggcctctttgcccccttaggttccccaaatcccttaagcctccctacacaatggtcccactacccagcagcttccagcaggcagaaatgcagcggtggcagaggcctcaaatggaattcgctgaagcaggcatccagggggctccccccacccactcactgacctctgtgaccctccccggaacccaataccttgtcgccagccttgctcaaagcaaccctggctttgtccgagctgtgtaagcacgcacacacgcacacacacacacacacacgggcgcgcgcacacacgcaagattcagggagagtcatgcgtttattgttcaaccagggctttctacctgaagagcaggcagtggggtggggagtcacaggtgtctgggtatgtggggccaatgcggttctttgtggggatggacacagggctgtggctgaggttgaggatggagctctttggggctgtagattcagaggacattaaagatgggctgaggtacacaggcaatgaggagaaaggggttggtaaagagggtgggttagggttgaggcgcagaagtggagctgggactggtgacagggatgggaatgaatgggtttgggaacagggtattgagagtggggaagagagaggcaggtaggagtggctttgggattagggagaggatagggaatggggttggaggagccctgggggttgagaatgaggtaaggattgtggttgtggttggggatggcattgggaatggggttgaggccatcaaggagacaggtttgggtacgaggtttaggattttcttctcacttgggattcaggtgacttaggtcaggttcaccaagtgcctcacaggagctactcctgggattgtggttttggggagaggggaggatggaagatgtttcttggggttcttctgacagggctgagatcactctgggccccaggaaaaccctcctgggtgactgcaatctcaggtgcctgaccctccaaggtcctagtactctgtctcccagtcctcagcagccagtggtgtttccaggggtggctctggacctcgagcttctttcttcccatcctgggcaggcagtgttggtggtgatggcagtgtcattggtggggtcctggggccagccccagggccccccgcccggcccctctctggctgctcagctctcccaaggccccgtcgatgcaggcctcggccccagcctggcctgtgcctgacttcccagcctccgcgtcccctgggaggcctcctaactgcccccggctgggagtggcctgcctgggagcagcaggggcaagagggcaaggcctgttggaaggtgtaggcccccagcagggcgctgtgcaggaggcaggagagggtgtccaggcgtatgggcacggtgacagaggccacgctctccgggagccccaggtgggtggggtctgtggagttcaggagcaagggtggaggggctgggagaggcgcagggggccatggctcggtcccagatgacggcagggacaggttgttcctagaacaacaaaaagacaggtcagtggggctcagcgtctccgtactttcttgtttctcgctgccaggctgtctctgcacctctgcagaaggcagccatctctccatcctcagtgcccacctgtgacttcctcccccgcttctctctttttgtttctaacccgggtctctctaaagaaacagacagctctgccatgaacttcggcaccagacagaactcagttccaattcctggtggcctcgcttttggtggtgtatctttggacaaatcattttcctattccgaaccttaatttgtttatagtcacagatggctttggatggtatcaaaggtgcgtatgacagcgctgggtctggtaagtgctaaaacagtggacagctacgatttctccagccttctggggatccctggagtcttcacatttcttggtttattcttggaaatttctgttcgatgagtatctgtttctagctcttttttttttttgagatggggtttcactcttgttgcccagactggagtgcaatggcgctaacttggctcaacgcaacctctgcctctcgggttcaagcgattctcctgcctcagcctgtcgagtacctgggattacaggcacgcaccaccacgcccgtctaattttgtatttttaggagagacagatttctccatgttggtcaggctggtctcgaactcccgacctcatgtgatccacccgcctcggcctcccaaagtgctgggattacaggcataagccactgcacccggcctccgcctgtttctaagtatctcgctcaactctcaccaagatcttctaagattctgtacctatgtgatgatacctgagccttttttgtttttcctgattctctatgcaggtctgttcagcgcgccctttctctctcgttttctctgtcccctcctctctctgggtctctgtccccctctcaggaggtctttgtttgtctcacccttcaggcccagccccgtcctttggttgttccatctccactggggccctcttacgtatcttctagcaacttcgcctccgagatccttcgggggcccgggaaggttggggaggggccgaggccgagagaggcggggcttggccgggtcagaaatggggcgtggctcgcggagttatccgggatcccaaaagaaagagctcaggcggggacctggatctagttccccaagatcacttacttaaggcctccagcaccctgtagcccctcctccctcagacccaggagtccagatccccagctcctcctcgctcagacccaggagtccagatccccagctcttcctccctcagacccaggagtccagatccccagctcctccctaagacccaagagtctagatccccagccccctcctccctcagacccggaagtctagggccccagcccctcctccctcagacccgggagtccagatccccagctcttcctccctcagacccgggagttcagatccccagttcctcctccctaagacctaggagtccagatccccagccccctcctccctcagacccggaagtctagggtcctagccactcctccttcagacccgggagtccaggctccagcccctccttcttcagaccccgtactctggttccccagcccccttcctctctcagattcagtagtcccgggacccctgcccccttctctctctctctctgtctttctctctctttattcctgccatatcctcaagacagattctttaggactcaagggacgttttaggtagggaaatgtggacactccctagggcagagggcgtggtagatggtctggaggtcttagccattctaggcgctgggttctactaggtgccgtgtctctaacttgctttgttactttaggtgcttctactctctatgccctagtttctccatctgagaaatggggctaatattactgtccaggttcttgtgatattacttgtgtattagtagacacagaatctggaccacaattaggctgaacacatgagatttacttattgttattgctggtggttgtgacagtgttttgctgagaagcaatcgtcattattacatgcattcatttaagaaatattcaatgcctgctatgatttgggctccaggctgcacacgggacagaatagacatggcccctactctcaggaaacttgcatgcttgtaagggagacagacgagacatacatagcatatattctgtaagaatatgtacctgaagatgtcaaatcagggcaagaggatatagagtcaccgaggtagggagatagagcagataacgtggttaggggcctggcccggtggctcacgcctgtaatcccagcattttgggaggccgaggtggacggatcacttgaggtcaagagtttgagaccagcctggccaagatggtgaaaccccatctgtactaaaaatacaaaaattagctgggcgtggtggcaggcacctgtaatcccagctattcgagaggctgaggcaggagaatcgcttgaacctgggaggcagaggttgcagtgagctgagatcgtgccgctgcactccagcctgggcaacagagtgagaccctgtctcaaaaataaataaaataaataaataaataaataaaaatacaaaaattagccaggcatggtggggcatgcctgtagtcccagctacttgggaggctgaggcaggagaatcacttgagcccaggaggcggaggctgcagtgagctgagatggcaccattgcactctagtctgggctacagagtgaaacttcatctcaaaaaaaaaaaaaaaaaaaaagaataaaaaattaagtagataagatggttagaaaaggctgttatgggaaggtactggaagactggaagttgaatattcctggggagggaacagcttctgaaagtaaaacaaatgtagtgattcagggactggaaaataatcagctaagaggagtggcataggtatttatatttttaaataaatgctttatgttgcaatactttttgcgtgtgttttttttgagacagggtccccctctgtcacccaggctggagtgcagtggtgtgatcatggctcactgcagcctcaacctcctgggcccaaaccatcctcctacctcagcctcccaagtagctgggaccacaggcacacactaccacacggggtgccttattttgtagagacagggtctcagaatgttgtccaggctggtctcaaactcctgggttcaagagatcctcctgttttggcctcccaaagtaccaagagattacagtcatgagccaccatgcttggcctggaatacttttatacttagagaaaagttacaaagataatacagagagttctcatttactccagacaggagttcccctaatgttgccatcttacattgtcatgtaatgtacatggtacattagtcacaactaagaaactgacaggactattaggtaaactgcaggctttatttggattttaccagtttttacactaatgtcctttgtttctggtcctggatccaatctggactaccacattggatttagtcatcctctctcgttagtcttctctaatctgcagcactctctaagtctttccttgtttttcacaaccttgagagttgggggagttctaaattattttgtaaaatgaaggtcttttttttttttttgagacagggtctccctctgtcacctaggctggagtgcagtggtgctatctcagtgcactgcaacctccacctcccgggttcaagcgattctcctgcctcagccccctgagtagctgggattacaggcgcctgccaccacgccccgctaatttttgtatttttagtaaagatggggctttactatgttggcaagactggagatctattttaatgaataatatgaactaatttaatccacattttaaaaaattatgtatttattttaatagagaagaggtctctctatgttggccagttggtgttaaactcctggcctcaagcaatcttcccacctcggccttccaaagtgctaggattacagggtattttaaaatttttatttatttatttatttatttatttatttatttatttatttaagacagtcttgttctgtcgcccaggctggagtgcaatggcacgatctccgcccactgcaacctccgcctcctgggttcgagcgattctcctggctcagcctcccaagtagctgggattacaggcatgtgccaccatgtccatgtccagctaatttttgtatttttagtagagatggggtttccccatgttggccaggctggtctcgaactcctggccccacgtaatcctcctaccttgagtgctgggattactgggataggcccccgtgcctggcccacaacattgcattttaaggaggagaagtcccaggcaacaggatcgccctatgctggacgatgttagtggcactgagtggccggaataagatttttgccaagagatctggcttgcttttctttcctggagactgatgagaacccagatcttcagatttcaagtctgggtctatccattcggttactttaaatcccagaggcagatggcgctcactgctcaagtctagcgtcatgggattgttctagcttgttcttttattgcttctcctattactaagatcaggatctgacgccatttggaaaccagggtctgaccgcttaccacgtacctcgccctttaaggctttttctgtcccgtcccccgtgcccctgcggcgctaggagactggaggcgggaccttgtgtcgctaaggaaatgccctttactcagcttccaaaattgacaggctagttctgaaaactggccaaccaacttctgcttaaggggaagcgagacttccgatttgtaggggaacgcagcggcgattggttagagtcccgcccacttgttaagcgtcgcgagccactattctcggctctgattggccagagaactcgcgccgcttttgaatccccaccctgcggaccccgcgcgcctcgccttctccctctggttggcgagcgcctttctgcgccttcaggcatttttgctgaggcttttgtctgcgcatgtgcgggtaggttccggtagcatccgggagacccggcccaggcctggagatgctgagcggagcttggagggagagaggggactgggttgttgaggggagaatccctctcggcatctccttggcccactggggagccccattgccccatccaccgcttagaaccagacccttcctttcactctccactccctatccctaccggctttagaccttcaaagttccaagattcgaccttcggggtctccccatttcgtaggggcttacagatttcctaaaatccccctcctccccgaacccccttccgtccctggagattctggggtccctgctctttcccattcattccaccccatctacttgggacccttccaagggcaaggggggcctctcagtgcctctcctaccctcatgtcctttctcctcttttaggtccaggaggtcatctttgcctcccttccttgaaatctccccagatttagaggccctcacccagcttctcccctctcagccctgtcgaggtgtcaaggttcggggatcacctttgttgttgttattgtcgaggcgtcaaggttcgggtgtcacctttgttgttgtgtgtttttttttttttgaaactgagtctcgctctgtcgcccaggctggagtgcagtgatgcgatctcggctcactgcaacctccgcctcccgagttcaagcgagcctcctgcctcagcctcccgagtagctgggattacaggtgcctgccaccaggactggctaattattgtattttcagtagagacggggtttcaccacgttggccaggctggtctcaaactcctgacctcaagtgatccacccgccttggcctcccaaattgctgggattacaggcgtgaaccacagcgcccggcctaagccctagctgttcattgccacaatgagaggaagtacaggaaggtgttgagatcatgggcgtggagtccaactgacatgcttgactgatgtcacatactgctctgcccctgaaaagctgagtcaccttgggtaatttgcttagcctctctgagcttcagtttcactcgggagctggccaagaacacttgtctcagagttgctatgacattcgaacatggcagtgtacgtaaagggctcggcatggagcttgttctcattaagccccatggcacgtgggcatctatgctttttttttttttttttttgtagaaaaaagtttatttgctggttattgtttgatccttgaaatacaattcctcactggtgatactagtataaaatggtggttatgaatccatgctagcccaacgaaaactaatttaacaaattggtaaaaaaaaaaaaagaagtcgtttttgaatctctattaagatttgaactaatacataagcaaatctgtgctaaaactggaactgctgggccaggcgcggtggctcacgcctgtaatcccagcactttggaaggccaaggtgggtggatcacgaggtcaggagttcgagaccagcctcaccaacatggtgaaaccccgtctctactaaaaatcagctactggggaggctgaggcaggataatcacttgaacccaagaggcggaggttgcagtgagctgagatcgcgccattgcactccagccagggggacagagcaagactccatctcaaaacaaaacaaaacaaaaaactggaactgccttctcacactacatataatttgccttccagcttcaaccatctgatgttgaaatctaaagcactctcatgagttaaatgtccctgacaaaccatgtagatggacaaaccagattggtggtctttaactgctggtgatagaaaaaggctgcagtttagtacttaaacctgcagttagtggtcaactttccatctaggtagagtaactaaggagagctgtgaaatatcaaaagaaaactagaggccaggacaaagaggcaatgtcagtcaagccactgcaagctggtatgcacccttgtatttcagccaaaggcaggcaatccaaaattacagattgctttccttaacttgaccaaacagtgcattttacctctgaaagtcttgtcaagggttgcatttcattgtacctagtaaaacacaaagtccactctcataaaaatattatattttccagaagaaatattatatgtaatacactgaaaatcactgattgcttttgcttctttttttccgtgaatgtgtaggtgtttgagtctcttgtgtttcttattttacataggatatgggctgtttgaaaactatttcattagcttcatcatcgtcattcatttcagccatttcagattttcgtctctccaaaaatgttggtgtacaaactggtgtgaggccctggatatccacagtcttctcaggagtgtcaagagtgcctaaaacctttttcttcttcttatgtaaaagatggccttttgtagacgtctgacaattagtttttgaaatactttctgttttctggaaaatcaaagaaggaagaaggaaaatcataatcaattcctttttttttttttttttttttgagattgagtcttgatctatcgcctaggctggagtgcagtggcccaatctcggcttactgcaacctctacctcccaggttcaaacagttatcctgcctcagtcttccaagtagctgggattacaggtgcctgccaccatggctggctaatttatgtatttttagtagagatggggtttcaccatgttggccaggctggtctcgaactcctgactgttggggtgatcagacccaacactagactgtgggggctatgaagtccggcggagtcaaaggaatgagaaaagacaagagtgcataagatgggtccaggggaccaatgctagtatggaggctgcgaaggccgcaagctctggaagcccgcactgtttattggtgatcaaacaaagaagcaggtagtgaggatgtgggggttgaaagaaagtggtgcatcaagcgcatgatttacagctgtgacagtttagcattttctttgacgcatatggaacatgttctgctacttgagataatgggaaacatgttcttctagtttaagatacacttgatctatgagcctgggaatgctagaagcaaggagccggcaagtctagacacattccagaggccacgaggggtttcatgctctgagccctggattccatccaagccatgaggggttttatgccctgggcttagattacggtgccgcagggcagccttccaccctttagcacagagcttggtgttccaaagaccacaagggcttttagaccctggaccccggcatgttccaagactctttatattatgtcagactagcaagccctgcctcagcttttttctcactacttagcttttctccaacatgacccccttttcttttttgtaaaaccaccacagctatcattgcttgttctcgatggtggctttctctccagaggtggcttccgcatctgcagactaaaaggagacagcacaagcacataattattagaacaggatttccaagtgtagagttttcaatggccttaatccgtttaagaggattgattgcagacaacccattggctgtcttgttcaaattatcagttccagggagcagggctaagtgagtctgagaggcttcaaaatcctgctcttttagttttacaatttagagggtgagattttcctctctaccctctagatggcgtttaaccttcttccatcagtgttctgtctcattgtaactgaggagtaacacaaaagtcagatgtattccagtcacattgcatttgaattctactttctaaattcataatacgatctcccatccaaatctctgtctgacggagatcattaatttggttaactattttttttttatctatttgagcttgggagttccataattttgtggaattcttttgccacttattgacaaattcagcagttttcacagatgaatgtacagccacaccggctattgcagcggtagtagtaacagcaatgaggccaattatagcaaagaaaagagcaactataaatctttgggataagagttttttaaggatttagttacaatacgaatggatgatgatgcctcccatggtctatttagagacacatagggatccaaactccttctctggctttaattatcaggatagtctgatttttattaaaagttggtaacatttcctgttgctagcataaaagatggccgaacacagctttgaatccaaaaggtcctgttggaaagaaaagagagagcatatttatttttacctccctcccctctataccttttatatgtaccctcccaacttttgattgaactttcagccatagctaatttccataattcagaatgttcctgtcttatggcaggagatatcatttttggactaggggcaacaatgccagcaggactctatatgataggggcattagcttccgtccgaacatactgtgtatgattcctttgccagcgattcctctggtttactacatttgttctacaagaaggccttccggtgcaattttccttaaagatccccttaggggactaatcaatggtgattccataggaattattttgtagcacctcagccttacttgctatacaatcttcccaagttcaagcatccacaccttcaaaccaaactttgcttcgctcacattcacgcttattaggatggaacttcagggttttaggattggaataattatattttaaactactcccccaaatcatatgcaaagcagcctgtgatttattttttccggggactactgccaaccaagcttgtgtgtcaatctgtaagcatccaacaacaggtcccaggcatatgggggatatttatatcctatagatatattcattttatcatcccttcctcattaggatgcattggcccttattcagaatggagtcgttctggtttgaatgcttcttacatatttccactttcccttttacaagaggatccttaatcctaaggcttgcagaaggatgaaggtccgtcttctgcaacttcttcatgctgaataggggtgatgatattcctgcctaactattagggtctcttgtattcaggtagagaggagctcagtcagaaagcattggtccgttaagcatctattgtacctctgaatcccagcaaaaggtacaaccttggtgttccagcagtttttcagcttcctgtgtggtttttcttgatctgtccccatgttatgggggtggatgtcagcatgactccggtcggtcctcgttccgtcttcgcattcagactcaactggctcatggcttgtactgggggaaccaggtccacggttgggatccatggatctctccagtctcccattccatggtcgtacacatcttgagggcatccgcacggtttgttcatctcctgcaaaaacacaagcataccctcaaagccatgttagtaaatctagcgaaacagaagcaaaaacttttgtggctgtagccgggaggcatgccattgctgaagcatttgttctacaagctgtaactcagcttctgcctctgtggttaattaccatggggtaaaactttccactgataatgagaaacaggccccttctaacagaaggcacagaaaaagcaaatcgaggcttatccttcttgtgcaacagtatagcagaaaagcaatccttaagccttcaatttgcactgtacaggtgggtccactagatgctgtaactgatgatacatcttcggatgtttggtgggcaccacacaggcacctgactgtcacctggagagacacaagcaaatcctcttccccatataattatctttcctttttctcagctctttgtatgtgcttccctccaccatatatcttgtccagactttttattttccttttctacattccttttttgtgtgtccaaattgcccacaattaaagcaagagcctgagaaacggggcacattccttcctactttcaatccagccatagcctgagctaaaagaggagccctatgcaaggtatctccaatgccatcgcaagccccagtatattcagccaaatgagccttccctctcataggtctgatggcagtttgacactctgcatcagcattttcatatgcaggaagctgtattacaacatcctgagctgttttatcagttatggctttatacacagcctcttggagccaagcaataaaatcaatatatggttctttaggtccctgtcggacgagctgaaagaaggatatttttccgctgtaacatttatcctttcccatgcccgtaagcatgcagggcacagctgaacaatggcaacatcctccattactgcttgattttctaatctaccccagttggggccaactcccatgaactgttcaaaggaaacaggcacaggtggctgcgcttgtgtgttttcccttgcctgagtttgagcttcatcagcccaccaagttttaaactgtaaatactgagacggagtgagaacagattttggtaaagtatcccaattatacggtattaacctagtatcaagagccacattttttaacaaagtttgcacaaaaggaaagttcggtccatattgagtaatggcttacttaaattcctttaataacttaaaaggaaaagtggcccaattagttatattctgtcctccttgctggattatagtaactggaaattgccatgcttcaaggtcttcctcagttctagctttttttttttttttttttaacagagtctcgctctgttgctcaggctacagtccagtggtgcgatctcggctcattgcaacctctgcctcccgggttcaagcgattctcctgcctcagcctcccgaatagctgggactacaggcgcacaccaccacgcccggctaatttttgtgtgtctttagtagagatggggtttcaccgtgttagccaggatggtcttgatctcctgacctcgtgatccgcccacctcggcctcccaaagtgctgggattacaggcgtgagccactgcgcccggcttgctctagctttttgaatagaattttgcatagcaccaccaattgctccaggttttaatgttgcaactacaggagcagaaaattttatagctaattcactttctcgcccattaaggggaaagggaggaggtggccattcacttaattcagcaggtagagccgatgggctagtaaaatatacttttttcggtttccccttttttaacctcttctcttttttgctccttgcattcagaatctgaagttagttttttacactcgtcctcctcttcctcatctgaatctccctcatcatctgtttgaaagggctcaagggctgcctttattagtgcccacattgaccaaacggaaactggaatttttgctccctctttatacgcctttttaaaatctctgccagttctctcccattcatccaactccatagtcccttgttctggaaaccatgggcaaaactgctttactgtactaaagagtgataacaaattttgagtactaactttcactgcccctttttgtaataaatgccttaagaaattcagataagcagaatgttcgctttcactttgtctgattgttaccctggttcttctgagcactcagctttcccaccgagcttctttcagtcatcctcgggtgtcctctgatgatacttcctccactttcatgtcctctagcgttccttcaccgggatcttcattgtcccatgttgggcgccaggaatgctggggtgatcagacccagcaccaggccatgggggctacaaagtctggcagagtcaaaggaatgagaaaagacaagttaaaagtgcataaggtgggtccaggggtccaacactagtatggaggctgcgaaggccccgagctctggaagcccgtactgtttattggtgatcaaacaaagaggcaggtggtgaggatgtgggggttgaaagaaagcactgcatcaagtgcatgatttacagctgtgacagtttagcattttctttgaagcatatggaacattttctgctacttgagataatgggaaacatgttcttctagtttaagatacaattgatctatgagcctgggaatgctagaaacaaggagccggcaagtctagacacattccagaggccatgaggggttccatgctctgagccctggattccatccaagccacgaggggttttatgccctgggcttagattatggtgccacagggcagccttccaccctttagcacagagcttggtgttccaaaggccatgagaggttttagaccctggaccccagacatgttccaagactcttttacattatgtcagacatgcaagccctgcctcagcttttttcccaacactcagcttttccccaatacctgacctcaggtgatccacccaccttggcctcccaaagtgctgggattacgggcgtgagccaccgtgcccagccagctaatttcttcctgagtaatctttatttctttttaaatcactcctcatctgtagcttttgtgttagtgtccgattctgattataccatttcgctgatggatttgatggctgcttaaatggaatattccagtgtttaaagagttctttatgtacttttccaggtggcataaaatgacactccaagagtctttcaccaaacaggtagttgttcattgtttcagcaactatcttggcaacatcctcagactcaaactccacaaatgcatagcctttgccatttccagtcattttacttctggacagtctgaactgtgtcacagtgccaaactgggagaaatatgaaaagatctgggtttcgttaagtagggttgttcttgttttttttgctgggttatgtgcttgcaaacctgcgccacctccttttgaaactggacatcttcctgcgggttaagcagtgagatctcagccaggccagaaaaagctgccatgccaaaagcggccgacactaactccacgcggtgctcctggaaacgtcgggctcccagctcccatgaggcagaaaacgggcatctattcttttaacatacgtatgtatacacagtccaagtgatggaacatcaggatcagtggcagctgggagggtgggggaggcagcaccacctgatatttaggagggagaatgaccgggagttgccgatacgtggagtgagggataagtcagagttgttcctaagattttgagtttgggcaatggtggcatggtaagctaagatcaaggatatgaagggaagaagggctttcaggctgggagcatttaggagagcatgagaggataatgcatgtgttttggacatgaggtacttgcagggtgtccacatacagatgtctgggaaacaatagatgcaggctgggtgtggtggctcacgcctgtcatcctagtcgcctggatagctgaggcaggaggcctgcttgaggccaggaatttgagatcagcatcggcaacaaagcaagaccccatatctaccaaaaaaatttaaggtcgggcatggtggctcatgcctgtagtcccagcactttgggaggctgaggtggatggatcacgaggtcaggagttcgagaccatgctggccaacatggtgaaaccctgtctctactaagaaaaaatacaaaaattagtcaggggtggtggtgcatgcctgtaatcccagctacccaggaggctgaggcaggagaatctcttgaacctgggaggcggaggttgcagtgagctgagatcgtgccagtgcactccagcctgggaaacagagggagattccatctcaaaaaaaaaaaaaaaaaagtcaagaagaaataaacgtggtgctctctggagctggaggctgttgatgtaggtgtgggaattaccacttgggagagttcatctctgcctgtttcaaaatccatcgtgagcattgccagtgctttcttgaagagctctcatgagcgtggggcaggattggtgccatcttcatatcacaggctgtcttagttcatttgtgtggctatagcagaataccacaaactgggtaatatttaaataataaaaaagtacttctcatggctctggaggctgcgaagtccaagatcaaggcaccagcaggttcagtatctggtgagggcctgatctctgcttccaagatgtgcctctcttatggaaggtggaagggcaaaaaggggccaacactgcgtgaagcctcttttatagtctaaatcccattcatgaaagaggatccctcatgacataattacctcctaaaggccctgtctcttcatattattgcattggggattaagtttcaacatgaattttggagggacacaaactttcaatccatggcagaaactctttgcagagccattttgctgcaaaaacttgagggtgggggtatgacttatttaataaagatgacattttctgtataaatgatacctaagtcctcctcattagcaaatgtcgaataggacattttctttttttattattattatactttaagttctagggtacatgtgcacaacgtgcaggtttgttacatatgtatacatgtgccatgttggtttgctgcatccattaactcatcatttacgttaggtatttctcctaatgctatccctcccccatcccccaaccccaccacaggccccggtgtgtgatgttccccgccctgtgtccaagtgttctcattgttcaattcccacctatgagtgagaacatgtggtgtttggttttctgtccttgcgacagtttgctcagaatgatggtttccaggaataggacattttctttctttttctctttctttctttcttctttttctttttctttttttttttttttttttttttttttgagatgcagtctcactctgttgcccaggctggagtgcagtggtgcaatcttggctcactgcaacacccacctcctaggttcaagtgattctcctgcctcagcctcccaagtagctgggattataggcacccgccacaacatctggctaatttttgtatttttagtagagacagggttttgccatgttagccaggctggtctcgaactcctgacctcaagcgatccacccgccttggcctcccaaagtcttgggattacagccgtgagccactgtgccccgccccgaataggactttttctgttgcctcttaaatggtttaaagagggcagccaataatggggtcagaaagcttctctctgcctagcttcccaaaaaaacaaagctgccagctggctgttggacaggtgagaagtctttggtgagatgcttcatcatcctctctttcctgaactcttcacgtgtaccagggctctggataggagggggtgctccaagaaaatgtttaggaaagactagggtttcctgatagaatgggaggaatcaacacactatctccccattgggtgtctgtgtgggcagccaacttcttgctgtgccctgcatctccctgcgcaggggagaggagcattagagaggaaaagctgggggcaacgaggagcttggggcagtgtagcctgcactccacagtccagcatggttaggatgtgtgggtttctgagtcctttctggctactataacaacaataccataggctggatgggttgtaaacaatgaaaatttatttcttatagttttagaggctgggaagtccaagatcaagatgtcagcagattcagtgtctgatgtggactcacttccaggcttacagatggtgccttctggttgtgtcctcacttggtaggagggacagctctctggggtctcttattaagggcactaatcccatttatgagggcaccaccctcatgacctaatcaccttccaaaggtcttgacttcaaatatcattacattgggggttaggaattcaacctagactttggaaggacacatacattttgtctatagcagggggtggatggacacgaaggagggtagctgggcttctgcaatctaggtgatatgtcacccaagaaagcggtaagaggctgcatggtgtctgccaatggtggaattggagaaggtatgggagaagcaggggacacaactctcatatcaagaaacagaggaggctgggcacggtgactcacatctgttatcccagcactttgggagactgaggcaagcaaagcagttggggtcaggagttggagaccagcctggtgaacatagcgaaaccccatctctagtagtaaaaatacaaaaattagctgggtgtggtggcgcgcacacgtgtagtcccagctactcggaaggctgaggcataagaatcgcttgaacccgggaggcagagtttgcagggagccaagatcgcaccattgcactccagcctgggcagcagaacaagactcttgtctcaaaaacgaaaaccaaacaagcaaacaaacaaaaaaacatgattgactcagtgatcagaaaacatataactattttatattcatacttcctgcagttaatgtcccagttgactggttaaaaagaatatttgggggccaggcgcagtggctcatgcctgtaatcccagcactttgggaggccgaggcgggcggataacaaggtcaggagatcaagaccatcctggctaacacagtgagaccccgtctctactaaaaatacaaaaaattagctgggcgcggtggcaggcacctgtaatcccagctactcgggaggctgaggcaggagaatggcatgaacccgggaggcggagcttgcagtgagccaagattgcaccactgcactccagcctgggcgacagcgagactgtctcaaaaaaaaaaaaaaaaaaagaaaaagaatatttggcaatacggaaagttccccttgggttttctgactccaagcctggtgtttttgtttgtttgtttgtttgttttcatttgcacaacattgcctttccccaagagtactggataacaatgccctccctccaagtcccaagtcactattgcagaagtcaggaccttaacacacacatttcaaagttactgacacctagtcaaacctggtgccttagcaatgcaatcttgtaatttcccaggtcaaacagatcttcaagggttgctctcatggcagaatttggtggtagaaggaaggaagcagagtctcagtctttgtgcagcttgtagggagttccctttttctcaagcccttgcagcatccttcccactctaagcttaaaggagactgtgtaaccagcagtgctcacccatcctgggcctgagtttgaatcccagctctggagttcagctgtgtgacatgcaagaccttgtccctctctgaagtccttctgtaaaatgaggtggctgcattgggtgatcccattccacaccatgagtctatagtcctatcatcctgggtataccgacgtctggtggccaactttggtccttgcagctaattcaggttttttctttgtttttgagacatagtctcgctgtgtcacccaggctagagtgcagtgacgcgatctcagctcactgcagcctctgcctcccaggttcaagcgattctcatgcctcaggatcctgaatagctgaggaatacaggcacctgccaccacacctggctaatttttgtatttttagtagagacaggctctcgctctgttgctcagactggtctcgaactcctgagctcaagtgatccgcctgcctcggcctcacaaagtgctggattacaggcgtgagccaccgtgtccagctcagtttttaattttttatttttcagtatctggagtgtttagcacagccaggaaacaaaacacaccagagagggccaccttgccatgtcaccaacgatgcaataactaccgaagaaaggccccttgggtggctatggaggagcagaggtcagcagaggagatggccagcaaagtgctctcctttgctctatttcttttcttttgagacggagtcccactctattgcccaggctggaatgcagtggcatgatctcggcttctgcaacctccatctcccaggttcaagcaattctcctgcctcagcctcccgaggagctgggattacaggtgcccgccaccacacctggctaatttttgtatttttttaggtgagacggggtttcaccatgttggccaggctggtcttgaactcctgacatcaggtgatccgcccacctcagcctcccaaagtgttgggattacaggcgtgagccactgtgtgattcttagcatgttgtaagtttgtcattgttccatttccaaagcattccaacctccatccccgcatgcgtttgcacttctttagatttgtgggtctgagagcgcattagcaccccatccacatgcagtctcctgcccttccaatcctcaccctgaaaaccttcctgtagtcacagacctagtcatttttcccacggctactcttgaactctttatggacctctgcgctcgcttcctcttctgtgaaaacaaatgagtttatgtagattaagatctagccaacttctgtaaaggatcagatggtaaatattttaggctttgcaggctagtgactcaactctgcatgaaaataactgcaatgtgtaaaggaatgagcatggttgggcaccacactgaaatttgaatttcatctccttcccaggggccccagaagagtcttcttcttcggactttttccccaagcatttaaatgtaaaaacatttctagcttgcaggtggtatgaaaataggcagcaggctggaggtgactgaggagcctatctagtcttttttttttttttaaacagagtctcgctctgttgcacaggctggagtgcagtggcgccatctcagctcactgcaacctcggcctcctgggttcaagcaaatctgcctcagcctcccgagtagctgggactacagttgcgcaccaccacgcccagctaatttttgtatttttagtagagacggggttttaccatgttggccaggctggtctcaaactcctggcctcaagcgatccatcagcctcagcctcccaaagtgctgggattacaggcgtgagccactgcgcctggctgtatctagtcatctttaaagaccctcccatctctgagaacccatgaaactgcgcagtcctctggactggagctggggtgtgtcaaaggcaaatctttgcctgccttctcagaacaccatattcagagaaggccattcaggacagatttgtcaggctgttccgaatgcccaggtctgggatgagatggcctatccatggaggatttttattttttcgagacagggtctcactctgttgctcaggctggagtgcagtggtgtgatcttggctcaccacagcctctgcttcctgggttcaagtgatcctcctgcgtctgcctcccaagtagctgtgttacaagaaaggggtcctgatctagaccccccaagagagggttcttggatctcacacaagaaataattcaagacgaggcggtaaggtgaaagcaagtttattaagaaagtaaaggaacaaaagaatggctactccatagacaagagcagcgcctagagctgctggttgcccacttttatggttatttcttgcttatttgctaaacaaggggtggattattcattcctcccccttttgggacatatcgggtaacttcctgatgttgccatggcatttgtaaactgtcatggtgctgtcaggagtgtagcagtgaggacgaccagaggtcactctcgtggccaacttggttttggtgggatttggttggcttctttactgcaatctgttttatcagcaaagtctttatgacctgtatcttgtacggacctcctgtctcatcctgtgacttagaatgcctccactgtctgagaatgcagcccagtaggtctcagcctcattttattcagctcctattccagatggagttgctctggtttaaatgtctgacagctgggactacaggcacacaccaccaagcccagctatgttttgtattttttgtagagatggggtttcaccatgttgcccaggctggtctcgaactcctgggctcaagcaatccacccaccttagcctcccaaagtgctgggattacagacacccaacccatttggaggattttttttttgagatggagtctcgctttgttgcccaggctggcgtgcaatggtgtgatcttggctcactgcaacctccgtctcccaggttcaagtgattctcctgcctcagcttcccaagtaggtaggattacaggcgcctgccaccatgcccagctaatttttgtatttttagtagagacggggtttcaccaagttggccaggctggtctcgaactcccgacctcaggcgatctgcccacctcaacctcccaaagtgctgggattacaggcgtgagccactgtgccctggccagatgtttttttaaaagagagagaaagagagagagagagagaaagagagagagagagggagagaaggaaactttgcactctgttatcttcaacctcttactctaccttcctccctagccgaagtcccagtcctaaagcctaagagaccctcattggaacttgacttctgcataatccgcctgggtgcccttgggcatccgggcctcaggcctgggtctgacgcctgggaagttgagcgtggcataatggagctcctcttggctctcctgggattctggggcttgagtggatgatttgggttctgggaaactgggcaactgatactgctttttctggttcttctttgattctggggagggagcacctggtggaagaggggtccgaggactgtttggtgtggctttctgattccgcttctgagcctgagggaagaaccaccatccttcattcattcattcagcaaatatttgagcacttaccacgcgtcgggcactgatttacagcacagagtgaaactaagtccctgcccttgccttgctgagcttgcattccatcttggaaggaggaacagacaataattagcaaaagtacaatgactggtaagtgacaaatgccatcaagaaatttgagcacctttagaaggcagcgaaagggagggtgggatgactgtttaataggtcatccagggaatttcaagaccggcctggccaacatagcgaaaccctgtctctaccacaaatacaaaaattagccgggcgtggtgacacatgcctgtggtcccagctactcaggaggctgaggcaggaaaatcacttgaacctgagaggtggaggttgtagtgcgctgagactgcgccactgcactccagcccggacaacagagacaaaatctgtttcaaaaaaataattgatagccgggtacggtggttcacacctgtaatcccagcactttgggaggctgaggcgggtggatcacctgaggtcaggagtttgagaccagcctgatcaacatggtgaaaccccgtctctactaaaaatacaaaaattaggggggcatggtggtggatgcctgtaatcccagctactcaggaggctgaggcagatgaatcgcttgaaccaggaggtggaggttgcagtgagccgagaccttgccactgcactccagcctagacaacaacagtgaaatcccatctcaaaaaataaaataaaataaaaataaataaaataaagaatagcatgcatgcacggagagaaagactggagggggtgagaacggaagcagagaaggcatgcagaaggggccagtggtgcccggggtggggtggggggtgttgatgcatggcttgtagtagtgagggaagagtagggagaactggcttggttgtattttgaagggaatttgctgatggattggttgtggggtgacagagaagagaggagtgaaatatgattctaaagctttagacttggctgggaaaatgtggtgttatttgctaagatggggatagagatggagcataaatggtggaattagtctttttttttttttagatgaagtttcgctcttgttgcccaggctggagtgcagtggcatgatctcactgcaacctccacctcctgggttcaagtaattctcctgcctcagcctcccgagtagctgtgattacaggcacccatcaccatgcccaggtaattttttgtatgtttagtagagatggggtttcaccatgttgaacacgctgctcttaaaattttgacctcaggcgatccacccacctcggcctcccaaagtgctgggattacaggtgtgagccagcaggcgtggcctttttttttttgagacagggtctcactctgtcacccaggctggagtgcatggtgtcatcatggctcactgtagcctccaactcccaggctcaagagatcctcccacctcagcctcccaagtagctgggacaatgggcatgcaccaccacacccggctaattttttattttttttgtagagaagaggtctcactatgttgctcaggctggggaattatcttaagttggttttggacaggctaagtttgaagtgctgattagacacccacatggagatgttgcatagacagtcttcagggaaggagccacgagatacaattttgcagtcatcagcataagatgttatctcttaataatttccagaatttacagagtattacccaggggccaggtgatattctgaatattttattatgcaagtacaatatatttaacacccagcatcatcctaggaggtggccgctagtattgtctccatgttacagctaaagaaattgaggcacagagaagttaagacacttgtttcatgacacagtgatgacagcaggatttgaacccatgcaggctgatttcagaccccctgtgctgaatccctaggatgcccagcctcccgatgatacacataattgttaagcagttaagtgtagtcatgtcaatggtggcagtaataatggaacaatggctacagattgagaaagtgcatgtattctaatcctcaaaccaactctcaaaggagacagaggaagaaatgaaggctcagagggggtgagtgacgtggctgaggtctcatagctagtaagtgccaggcaggatttgaattcagaactatcggtgcttttcccaccttgatgtcgctaagacaaggggtgcaaaagtcagaaagtgggatgtcagctttagagaagagaaaaagtggaagcatggcccagacactcaccagggggccagccgtcgggaccacattgatgtaatccaggatcgtgctgtgccgggagaacctgggcctcggggtttctgtctgagtccgtctcttcggtagaatcttcatgctgaggaaatgaacccacctgtttgtgccctgctgcacctccctgtgacagactgccacgtttactacctgagaccgtcactatgacagttactactgttaccacttgagaccgtcattatgagactgaaagaaggaggacaaacgtagaaatgaaaacttaagacaaaagaaattattttaaaggaaggggtcaggggaagaagaagagggttccctgctactagtgagccagggcagctgtctgagcctctacagccctttgtatttattgggtagaaagagcagagagcaggaggtaacaattggtcagctgtttaattgatcacaggttcatattattactaacaagcttcagctgtgcctaattacaagaaacacttcgcttggggcgtgactgccctcagcattccctctgggaagcagacgcagtttgtcagttggacaacattctgcatttatgagaacagtttgctgtttactcatgtaacctccagaggtatactgcgttgatcacgaccttcactctttcggcctgcaacacctcccctcttcctgggtccaggccccagaccccgccacgcctcctcttaacctacatgatcagggccaggcagaggaaaagaagagccgtgatgccgattcccagaaacgctccgttggagaatgccgttgagatgagtcccttcttatctgcacacggagagggcaaggtgagcatttcccatccacgcagggctcacgaagcccgctcatcactcggcattaaggcttccggttcccatggcggacattgtatctgcaacccctctgtttacttttaggaaaccctgccacaccccggcccaggtgttaggacttcccattgtgttttcctgtctacatacagatgccacgggtctgctgtgtccctccaagctcctgctccaaccacaggaccctactctttgccccagtcagcttctcctccaagaaccttggcatccaggcggccccctaacctggcagctgcaggatggatccactctgggccccatggacgttccaggcctcacagcggagcctgaggccggagctgagccctccatggaggctcagggagctgttggcccagggcccggctgagctgggggtgacctcgaaggagtcctggctgctgttcccctccagcagctcctccccaagccaccagcgcagagagggggccgggctggcctgggaggagcagctgcagtgcagaccctcagcctcccaggagcaggaggggcccagcagcttcggggagtctgaggggagggaggacaggactcagcagggtccccttcctgggacccaggtgtcccctttcccccactcacagtgcacggagaggctgagagagacgtgctgggagcccagtgggtgccgagcgtggcaggtgaactctccttcgtgctccacttgaacccgaggcagctccaggaccccggggtctgagggctgggaggggctcagaacctgtcccctctgggtccagctcagcctggctggggggctgctgtgtgtgacacagaccaggcacaggctttggccctccagtactgggagagacgtgccgttcccaaggttttccaggactagggaaggaagaggcagaatcgatgagcagctcagggctcagggaccctcctgcgtggggaccctccagactcctgggcccccaattcggcactgagaggccttggctcctctgtcccctttcctacctgtcctgtttgcttgggaaaccatcactctcaggttctctggaggatctgaaatggagacaggggaccggctctagacggaccaggggcttccctctgggtaaagggaaccatcctggacactgaggtgggggaagtgggtgggatagaagggcagggcagaatcacccactgagtcccagacacaaactgcatgagggtctacacaggtaagaaggtcggtctccgaggcctggggctccaggccccctcagctctgggaccctgagcccagcccctgtatccctctgccctcccaatggactccaggcccctgctgggcacactcacactgcacagagaggtccagggctcgctgctgggagccaagcctgttctccgctcggcaggtgtagcgccctgaatccccagccttcaccccgggcagctccagccccaggggtctagggccccagggatgggacgaggagaggactctgttctgcaggacccagctcagtgtggcagggggctggctgtcagcagcacagaggagccgcaggaactggcctttttgggcttccaggtatgggacatttccctggggctggggctccagggctggagtgggaggaaaaaaaaaaaagagagaaagggagggagaaagagagaaggggtacagggaggagcacatcccctcatcccctgaagccttttcatctaaagacaactggcccagccccagcccgacggccctcagtacctggcgtgttgtcacgtgaaatgctgataacaaggtctctgggggcatctgcaacaagattgtgagctggcttcagggagggacaatttattcctcacacctggaaaaaactccctcagggaaaagaaagtgggactatcccgggaagacaagtgacaaccagcgccagggctcacgtgtgtggaccagacgccattcccatccccctcccagggctgcggcggcatcctgggaccccacagcttcctctccctggatgctcctgagctgggagccgctcactgtcccactgggctcctccacctccccacccaccggggctgtctgcacaccccaccctcccaggccacactcacaggccacacggagtcggacggtcctctgtgcgctcacaccctttctggagaagtccacatggcaggtgaggtcggtgttgtggtcctggggtctgggcgtgaagctgagcactgagaagtgggaggtcgttggtttggttccttgggaggagagggcagcccccgtccaggagaaagaagggggtggacattcctcaaaggcccagttaaacacacagatgaccgtcaccggctgcccgggctccagggtctcggggatgtagacatcaggcttctgagtcagggctgggacagagaccgtggtgggagattcttgtgctgcaggggtccctgagagccctctctgctcagcccataggctgtccccagggtccctccccagtgtgagaggcaggggttcccaccccattccatacctgttacttttagaaagaacccatcgttcatgaaattatatctcacatagcttcctctctccacccgaaagaagtactgtgactcatcctgcatctgcgcgtctctgatcaccaaggagcagttccccttggcgggatccccagtgagctggaatcggccccgggtgctcatttccacctctcgactctggtggtttgtggccacaggagcacccttggttgtctcagtcactgctttgaaccagtagccataagctggggtagaccctgtccagtcctgtcgggggtaggagaaagagcagggcacagagatgcacaggccctccggcaccatcactgactcctgcactcgtatccagaatctcccatccatagcctgggaccctgtggggagacagaggctcaacctgcaaccccagccctagctccgccccaggtcctttccggcccttggcccactcaccgcccagcagcgaggacagcagcagtggcagtagcatctccgcataggaggcgcagggcctgcctgagacaggcctgttctctggtcgtgctgtgagtggctcagggctcttggcagaaggggaagccgaaggcggaagctgagccctggggcctgatgcatgaaatgagcttcagacgctgagctcacagaactcctttgccttcccccacactctccggcccaccttgcccagttgtcctctgggtctcctgggggcccagcctggccttgggcttgttgagctggtccttccagagctccctgtgtaggaggagagggcaggcttgtgtctatcctgggggcctggctgggggtggggtagtggggtgggggctctccctctgggccctgggtcatcggaaaagcagaagtgagaagtccacagtgagctacccttatctgggccactggtggtggaggtggtgggtacaggggaagggaccgttactggagggggctggtcttgtcaggtaaaatgcaggatgcctggttaaagctttcacagacaatataaagtattttattttatgttttttggtataagtatgtccgaaatgctgcatgggatatacttataccagaaagcaaaataaatttatctgaaattcaaattaattaattaattaattatattttgagacagagtctcactctgtcacccaggctgcagtgcagtggtgcaatctctgcttactgcaacctccacctcccaggctgaagtgattctcctgcctcagcctcctgagtctgggcttacaggcacgcgccaccacgccaagctaatttttgtatttttagtagaggtggggtttcaccatgttggcagggctggttttgaactcctgacctcaaatgatccacctgccttgacctcccaaagtgctgagattacaggtgtgaaccaccgcacctggcctaaaattcaaatttaactgagcatgttgaatttctttttttctaaatctggccaccgtagggtggtgtcagctccacctcttcatgcttcctggtgagctcactgacccttggtccccagaagcagtctcctgccccaaccaggccctagtccacttcccagtctcccttcctcctctgtcattcaattgggacacccattgggattagaacacatatgtccaaagctaatgctgatgggaagagtttgaggaaggcgggagtgaggggcagagtggggggaacagactagggaaggggtaatttgcaatgaatggagtaaactctacaagatgttttcccctcactgagctcttcctgaaatgactctgtttgggtcacaccgaaacacagaactcatccttcaacctccacataccttgggtatcaagcactgagctttagggggacttggaggtgaatcctccatggtgagtcagctccagggccccaggttagcaaatgaagattcttagaaacaaagtacagaaggtcccctaaatgaactggatgctggacagacattcaggatgggacctggggaaggagtggtcagctcttcctggtggagggaagtcaggagaggcctcctggaggagatgacccagcctctgccctgtcctggttctttcatccatggcatttttgttttttgtttttgagacaaggtcttgctctgttgcccaggctggagtgcagtggtgtgatcatggctcagtgcagcctccatcttctgggctcaagcgatcctcccacctcagcctcccaactagccgggactataggcacacaccaccacgcccagataatttttgatttttttttttgataatttttgtagagacagaggtgtttgtttgtttgtttgtttttgttttttgagatggagtttccctcttgttgcccaggctggagtgcagtagcatgatcttggctcactgcaacctccacctccggggttcaagcgattctcctgcctcagcctcccaagtagctgggactacagacatgcgccaccatgcctggctgattttgtatttttagaaaagatggggtttcttcatgttgttcaggctggtctcgaactcctgacctcaggtgatccacccgcctcagcctcccaaagagctgggattacaggcgtgagccactgcaccttgctgagacagagtttcaccatgttggccaggctggtcttgaactcctgggctccagtgatcctcccgcctcggcctcccaaagtgctgggattacaggtgtgctccacggcctcatccactgtatcagtcgcttgagctgctgtaacagcgtgccccagacagaggggctgaaacaacaacattgacttcctcacagttctgggactagacgtccaaaaccaagatgtggttccttcagaggcttctgcctggcttgcagatgccacttctccctgtgttctcacacagctgttcccctgtgggtgtctgtttcctcaactcctgctcttataagaacttacaagaactcaagtcatattggactaggcccactctagtccaaatgagtgacctcatttcagccggccctcagtatgcacaggtcccacatcccggaattcaaccacctgcccatcacggcatttaaatacaaaaccaacaaaagccaacataaccataaaaaacagcatgaattaaaaatacagcataacaactatttacaccgcattacactgtattaggtgtgataagtaacctggagatgggaggatgtgcagaggtcccacgcaaacactactgtataaggcagctgagcattgtagattttggtatccaaggggtggggatcctggaaccaatccccaactaatacagtggaacaactgtatctctttaaagactgtctgcatgtacagccacattcttaggtactggaggttgggacttcaacacagaaatttggtggggggaggggggacacaattcagaccctaatatccacctctccccatttttttttttttttttttgagagagagtgttgctctgttgcccaggctggagtgcagtggcatgatcttggctcgctgcagccgctccctgtctgattcaagcgattctcttggtgcaggctcacgagtagctgggactacaggcgcctgccaccacgcctagctaattttcatatttttaattttatttttatctttttttttttttgagactgggttgtgctctgtcacccaggctagagtgcactggcatgatctcagctcactgcaacctctgcctctcgggttcaaacgattctgcgtcagcctcccgagtagctgggattacaggcgcctgccaccatgcccagcttatttttgtattttcagtagagacagggtttcaccgtgttggccaggctggtttcgaactcgtgatctcaggtgaccctctcacctcggcctctcaaagtgctgggattacaggcgtgagccaccaagcccagcttcaccttccctttgatccctgcttccctgtgacctaatctgggccttctctgaggacaccagcctccttcccgcaggggagctcttgtggtgggacacatcacaccttcctctccacagagctcagaaaagggcctctcccagggaggagtgaggggaggaaaggtgcctgggtcctggtggaggtgggtccctaaggagctgatgatctctagggcccccagcctgggcccagccccacctctgcctttgaacatttcacacccatgggatcagccgacaggagccaggagagcggcaccgtcttcctcctcccgcgggtttctccacatcgctgccccctcccattcccccctcttcacttttctgagttcctgtggtttctgtggcctcctcaccacgtccccttctccagcgaggccagagcccccgacgccccgacttgctcccagcccttcctacccaagccgccctcccagccttggtcagacaggactggagaggctgcctggggccccgggactggtttctgggcagcctcaagtctgttttctggcctgagaaggttcgggttttccctgagctgcttccctccaaaaccagctccctcaataccagcctcccacccccgcacccgcctctccttcattcagcaggggctaggcgcctgctcttcctccataattccacacggaggggtttaggaagccccacccaggctccagaccccggagctgcacgagggcacaagtgggcgctggaaggaagggcggggacggtgggaggtgggggagggagaggcgggggtgtctgacaggggtcggggcaggatctcgccccggggggcgcaggtgcggcgtgaggaccgcgtcctgaggagggaggggcgagggccagggtcctggagaggatggagagcccacgagtggctgcagctgagaccccgagggagcccaggaggttttgtcggaagaagggcgatctggaccttccctgaccagcgtctttgtgtcctttgagctccggacctggtcctgggttcctcccacctcgggctgtgctgcagttcaggacgccgcccccagggggcgctccaccttcagagcaggcggcaccgcggagcctcgggccccagagcccgcgctgtccatggtcctgcagaagggaggctcccaagggaacgagtcccaggctctggacacgtttgcagacagtactctctaaaaaggctacttttcgccacacattagaacaagatctcctccgggggaatcacattaaagcaaaaacgaagtcaccatcgtcactccacttctctcatcccaaacccaccctccccaagatataaagcccttcaaaatattcacactctttttttttttttgacagagactcgctctgtcgccaggctggagtgcagtggtgcgatctcggctcactgcaagctccgcctcccgggttcacgccattctcctgcctcagcctcccgagtagctgggactacaggtgcccgccaccacactcggctaatgttttgtattttttttttcttactagagatggggtttcaccgtgttggccaggatggtctcgatctcctgacctcgtgatccgcccgccttggcctctcgaagtgctgggattacaggcgtgagccaacgcgcccggcaatattcacactctttacagcgttattcccaaatgacttccacccaggcacattaagcatgtgatgtccacataagaaaatgcgctcctgggggcttttcaggtcattcatctttgctttgtctggattggggtcgtgtatatttcaggggctcttagctgggcctccgtcctttccttttcaagtcagaataacacgttgcagggcaagaagagtgaaatatcactagaggatagacttggattcaccctaatttctagtgaaggaaaaattttgcaagtgcaacactttattgtcagatataatagtgacttactggtgtgtgagtgtgatatgacactcacttcaagcattagttttccaaaataagattcaactccttatgtcaaacccctaagttgtctgtgatctgacacctgttacatatgtgcatttcagatattttcccccatctgttaacttttcttttactctcctgttatttacagaacagcaggactcttgctccccaaaacatgagttacccatgaaatgatcccctactgtggatggaaaagaagagccaagaagataaaaatagccctggaataaagagaacactaggtccatcacaggagagggtgaaaggtaaagagccttaaaaaggccaacctaggccggcatagtggctcacgcctgtagtcccagcactttgggatgccaaggcgggaagatcacctaaggttagcagttcgagaccagccttgccgacatggtgaaaccccatctctactaaatatacaaaaaaatcagctggatatggtgtcgggcacctgtaatcccagctacttgggaggccgaggcaggagaatcgcttgaacccaggaagcggaggttgcagtgagctgagacagcaccagtgcactccaggctgggtgacagagcaagaatccatctcaagaaaaagaaagaaagaaagaaagaaagaaagaaagaaagaaagaaagaaagaaagaaagaaagaagtcaacctaaatgcaagtgactttcaagaagaaacaccaatgctgtttaatggaatataacaaaatcaagcagccaatcacataaaaatcacaatgtccagtatatagagagaagaaaatcagaaaaaaattacataaatatcactttcaattgtccaaatttgaccagaactgtaaatttacagatccaagatactcaacctacttgaaacaagatatcactctctctctttctcttctctgtctttttctatcacacacactcctgctctccacacagaaagggacataataatcaaataattaaaactcagtgacaaacagaaaatattaaaattagtcagtgaaaaatgcaaacttccaaccaagaagtaaaaattaaaattaggctgggcccagtagctcacacctgtaatcccagcaccttaggaggccgaggtgggcagttcacctgaggtcaggagtttaagaccagcctggccaacatggtgaaaccctgtctccattaaaaatgcaaaaaaatggccaggcgcagtggctaacgcctgaatcccagcactttgggaagctgaggcaggcagatcacgaggtcaggagatcaagaccatcctggctaacatggtgaaaccctgtctctactaaaaatagaaaagaattagccgggcgtggtggcgggcacctgtagtcccagctactcaggaggctgagacaggagaatggtgtgaacctgggaggcggagcttgcagtgagccaagatcacaccactgcactccagcctgggcaacagagcgagactccatctcaaaaaaaaagaaaaaagaaaaaaaatacaaaaaattagctgggtgtcatggcgggcacctgtaatcccagctactcaggaggctgagagaggagaatcgtttgaacctggtaggcagaggctgcaatgagctgagatgaagccactgcactccagcttgggtgacagagtgagactctgtccaaacaaacaaacaaacaaaaaaacccagaaaactacagtagaatgcccataaattttgcaagtcaagggattttaaatacaaaagggaaaaaatgttaacctagacccaatttcattaaaaatatcatccctggttcacacctgaatctcagttctttgggaggccaaggtgggcagattgcttgagtccaggagttcaataccaacctgagcaacacggtgaacccccatctctgctaaaagtacaaaaattagccagacatgcacctgtagtcccagctactcgggggtactgaggtgggaggattgcttgagcctgggaggcaaaggtcacagtgagccaagttggggccactatactccagcctggataacagagggagactctgtctcaaaaaaaaaaaaaaaaaaaggattattccaaagtgaaagtaaatgaaaatgtttcaaaaccacagctgagagaattcatcaccagcatgctaacactataggaaatgaagtcttcaggctaaagaaaaatgatactgtagagaaaattatatgaacacataggaatgaagagcaattaaaatggttaataagtgaataaatttgaaacagcttattctgtaataaaacatctttttaaaaaacaaactcttttcaggcagggcgcagtggctcacgcctgcaatcccagcactttgggagtccgaggtgggtggatcacaaggtcaggggtttgagaccagcctggcccacatgggtgaaaccctgtctctactgaaaatacaaaaaaaaaaaaaaccacttagccaggcatggtggcacgtgcctgtaatcccagctacacgggaggctgaggcaggagaatcacttgaacccgggaagcagaggttgcagtgagccaagactgcaccattgcactccagcctgggcgacagagcaagactacatctcaaaaaaaaaaaaaaaaaaaaaaaaaaaaagaactgttttcaataaacatggagtttataccaacatattatggggatgaattcgtggcctatcaaaatcacattaaagtaagcatggagaacaagatattgcatggattataactcaaatcagtgataacacatatcagtctgtttcctctcctgccttcccaaccattcctatagagccataaggaagaggtgtggaaaacagaggtgaggggtggagagaggttgttctgcccaggaggtgggaccgaggcacccaggcgctccttgctccagccatctgcagagtgagagtcttaggacacatggtctgaaggaccctcacctccactggggacctggagcccagacctcagctctgctgtgaggagggagctcagtcaccgcaagcagccgtatccccttgggagcccgtgagcctgtgtgggaaacacagttctgagaggagagaccagtgctgtggaaggtgtgctctggggaggagaggataggtgaagccactcagggatttgagggctcaagttatagaacaacttgagaagggcttctcccctgtgcagacatccaggtgatgtcacaggttaaaagaaagccatccccattatggctcccctgagcagggtgaggggcagaagccaggagccccactgctctccagaaatttgagagcaggaacaggcggtacggggagggggctgggggaaggaagacagaggtgggggtgtcctcagcccactcttcccttgcctaaggcgcccccaccagaatcaggtgttctgctaacactcaccctgcacagccaggctcagggagatggggtgggagcccagcagggcctgagcccagcaggtgaattctcttccatcccctaaaaccacctggggcagctccaggacccggggatgcaagggttggcaggggctcaggatcaggctgccctgggaccagctcaggctggcagaagggctgctgtcagcatcacagaccaggtgcagggactgccctcctgcaccagcagagaggcagcattgcccagaatctatgggactagggaaaccgagagagctggaggggagggctgagaggcccttctctccctgcgccttcccccagactcaggagaggaaactgcgtttctgagacaagcatcacaagcaagggcaagtaggggcgaagacccccagcatgcaggggtcgggaggctccttaatggtcccgggacaggggcatggaaacatgcggaggacttggccgtatcgggacacggagagaacgtcccaggacgaccggccttgatgtgcaaaaccgtggagggcactaaccctcgtggttctggccacttggaggaaccaagacaggtgacacacttgggctttctccaggagccacaggagccaggggaggagctgagtagggatgtgactgggaaagatttggttaaagagagactcctctttggggcccgaattgtggtcattgaagggagcaagaccggaggctgctaggccaggagggaggctgctgcaggtccaggcatcacccgggtccaggtaagcaaagttagactttggctaagtgggactgtggctgtgagaatggaggaagggagggatttgagacattttccagtagccaagtttgtggagctcttgcctcatgggaagacttcggtgaaattctgagatgtgtaaagaactttccaggacattgactgagctgactcacatgggtgggggcgcctctcaaggggaagtgatttgtgctcagaacaagctgcaccagacagaaatttgtgggcatcttccaggcagaggtagggctaggatacaaacttcctgaaagggtcatgcagagggaggctggaggcctggggcgccactttgagctagtagccatagctggggtaaagtcattccaacaaggatcattgttgcctattccattcattaattccacatttcctggaccccatttatttcttctttgttcaccatttacataaatattgactaatgacaatgcctagacctgattagatgaagtggtcgacagggtaatggcccccaaagatgtccacttgctaatccctgtgaaaggcgttagccagcttgcattaggcagacagtaagggaagggtcccctgagaacctctgacccacctgataagcagttacaccagatgttttgtgcagataagggaacttgcacagggggcttgcctaaacaccccagcaggggactaagggcccacaaacgcactgggggaatggggtggagccatcaggaattttcaccttatacaaacaggtaacccagccccatcagcttatataaaagcccttgtggctggttgcagtggctcatgcctgtaatgccagtattttgggaggctgaggtgggtggatcacctgaggtcagcaattcaagaccagcctgaccaacatggtgaaaccccatctctactaaaaatacgaaattagccgggcaccgtggctcacaactgtagtcccagctactcaggaggctgagacaggaggatcgcttgaacccaggaggtggaggttgcagtgagctgacatcgcacaactgcactccagcctgggcagcaagagcaaaactcctaccccacccacctacaaaaaaacacaaaaaaacaaaacaacaacaccttgtattcaactgtgagggggtaaccgagaacctgctttcaggaaccctctctttgctgagagctttcctttcacttaataaattctactccactccatcttcaagtgtccacatgcctaatttttcctggtcatgagacaagaacctggacctagctgagctaaggagccaaaaaccctgcatcacctggaaactgtgaatatgttgccatacaagataaaggaacttttatccttcagagccaacagccaagagttgcaaaaaaaaaaaaaaaaaaaaaaaaaagacaaagggactttgcagatgtgattaagttcaagttcaagatcttgagatgggcagaagatcctgggttatccagatgggcccagtgtgatcacagtgtccttataagaaggaaagggggagaatcagagtccgagagacaagatgtgaggatggaacaaaggtcagagaggagaaaagatgccacgaagttggctctgacaaccaagaaatgggccatgagcccggaaatgcaggtggccactgaacggtagaaaaggtgaaagaacagagtctcctctggagcctccagaaggaatcagccttaattttatagcccagtgagtcctcttccatccttctgacctccagaactgtaagaaaagaaattgtcttgtttcaaaccacgaatcctggggtaatttgttagagcagcaacaggaaaatagcacaggtgaggactaattgcactgcttcctccccagatcctacaataaactcaatgctattctttccattttatgtaaaaggacattagggctgaggaattacggataatctctctgagttggcgcacgtggtggtgatggattgaggatccaaataaagagtcaaaaaattatggaattcaatggagggcccctgaggcctgggcagggcaggtgtggctacagaaagagcccctggaagatgcctgcctgaccctgatccaggttactctcccgtgcagggagcagacaataaaccatgaacataattatgcagctgcgagttattaagcttgatggaggggagccggtgcagtgagagaaacaaggtcccaacacaatgcagcctctggggtccaggagccccactgttgtggggaaatggggtctggatcccacggtaaagggacgtccataggaataagcggggaggctgacacagccgggttctcaggtgcgtcttcctcattggattctcctggggctctgtcctgtgaacttctcttctctacctgcaatcagctcttaccctttcaaataccttttaattttggtaaaaaggaaatgcagaacataaacatcaccattgtcattatgtttatgtgtacggttcagttctgtgaagcatattcattctgttgtacaaccaatttccagaactcttccatattgcaaaattcactctgtacccacaaaacagcgactttccattttccctgtcctgggtgcctggcaaacaccactgtactcactgtttctgtgaatatgactcctttagaaatctcagtaggtggaactgtgcagtatttgacttttcatgactgtatttcccttaggataatgtcctcaaggcccagccttgtggtagcaggtgtcagaatttcttttctttttaaggctgacaggttcaaatgtatgattttaccaccttttgcttactcatctgcctctccagaaatccacctcttggctctggcgaatgatgctgccatgaacacgggagtataaatatctattcaagttcccactttttttttttttttttgagacggactctgggactctgttgcccaggctggagtgcaatgacatgatcttggctcactgcaacctctgccagtcaggttcaagtgattctcctgcctcagcctcccgagtagctgggattacaggagcctgcccccatgcccagctaatttttttatttttagtagagatggggtttcaccatgctggccaagctggcctcaaactcctgacctcaggtgatctgcctgtctcggcctcccaaagtgctgggattatactcgtgagtcaccatgcctggccctcaagttcccactttcacttcttttcatgtagaccagaagtggagtggctggatcctatgtgaattctatttttaattattggaggaattgtcatactcttatcatcctctttccccatcatctcttgtcatcactttataaagatttactctagagtagtcccccatccacagtggatagcttccaagacccccagtggatgcctgaaaccacagacagggcaaaccctatatgtgctacatttttatacacacacacacgtatgtatatcgatgataaattttattttattttatttttttgagacagagtcttgctctgtcaccaggctggagtgcagtggcgtgatctcagctcactgcaagctccgcctccatggttcaagagattctcctgccccagcctcctgagtagctgggactacgggcatgcatcaccatgcctggctaattgtcttctttgtatttttagtagagacagggtttcaccatgttggccaggatggtcttgatctcctgacctcaagtgatccacccacctcagcctcccaaagtgctgggactacaggtgtgagccaccgtgcccagcctcctactctttctctttctcctactctggccttgtaagacctgcctgcttccccttcaccttccgtcatgattgtaagtgtcctgaggccttcccagaagcagaggctgctatgcttcctgtacagcctgcagatccttgagccaattaagcctctttcctttctgaattacccagtcccaggtatttctttatagcggtgctagacctgactatacaatatgtaacatatagtttgcaatttgtaacattctacagggtacaattcagtgacattaagcacattcaccatgttgtgcaaccactatttaccgaatttcctcatcatcccaaacagaaactctgcaccatttgcacaatcacccttcttccttgccctgttccccagcctctgatacgcaattctactttctgtctccatgaatttgccaattctaggtaaggctacataagcagaattatatactatttgtcattttatgtgtggcttctttcatgtggcatgttgtttcaaggttcacccatgttatagcatgtatcagttccattcaatttttaaggctaaagaatatcccatattatggatatggaaccttttttctatccacttatcagtcaatggacgcgagttttttttttccccaccttttagctcttgtaaataatgctgctatgaacattgatgtataggtatctgtttaagttcatgctttcaattctgggaacatatctaggaatcgatggctggattacactgtatttctaggcttaactttcggagagaattccaaagagttttccacagggtcacaccattttacatgcagtgcaaaggggctcccacttgtccatattcttgcaaacaattagtatttttttttcttttgagacggagtctcaatctctcgccaggctggagtgcagtggcaccatctcggctcactgcaacctccacctccttggctcaagcaatcctcccacctcagcctcccgagtagttgggaccacaggtgctcactgccacgcccggctaatttttgtattttttgtagagatgaggtctcaccatgttgcccaggctggtcttgaactcctgacctcaagcaattcttcctctttggcctcccaaagtgttaggattataggcgtgagccactgtgcccagcttatgctttatattttaagagttctagtgacagtgcagtggcatcttatgtttaatttttaaaaatttacttaaagttagatatggttgaattcattctttatcatatgtaattttatgtgggttgaccgatgcatatagttatatacacaaccgctgtgaagacaatgaaaagtgtcattacctgaacatttcctccctctgctgactctaggtagtcaatcctccctctacacttagtccctgagaaaacacggatctattctccatccctgccattttgcctttttatagaatgtcatataaatggaatcatacaaaatgtatcctctaaaatctggcttcatttacttggcataatgcttttgaggctcatctatggggctgggtataaatctgtcattttagtttaattgttgactggtgctccattgttttcatggtctctcattttgcatgtatttgccatttgcggagcattgcaactgttttcaggttctggtgactctaaaataatgttgctataaacattccattcaactttctgcgtgtgaacataagtttttaattcccttgagtaaaaacctaggagtcgagtgcttggtcagacgtacacttggtcaagtgtaagtttaaatttatacaaaattgacaaactattctccaaagtgtatataccattttgtattcctaccagcagtagacatgagctctgatcacttcacatccttgctagcatgtgatatcatccacatattttaaaatttcttgttacctttgttgtacttttcagtcatttttcttaggtatgtaattctacctcattcttcttctattctacaattacctaatgacaaattatattgaggctattttcacggccttgttcgccatctgcttttcttttttggtgaggtggctatgaaatcttcagtagcttttttcttaattgtggtaaaatatacagaagaaaaaaattaccgttttaactatttttcagtgtttagagaagttgcaccaagtacactcacgttgttatgaatcactatgatttatctccagaagtttcttcaccttcccaaactgaaactgcatcaaagaggtgaaaaccccctatttctttctgatcacagcccctggcaagcatggctctactttccgtgtctgtgaatttgcctcctctacacacctcatataagtggaatcatacagtgtttgtcctgctgtgactgacttagaatatatttaaggttcatccacgctgcatcatgtgctagcttctccttcttttttttttttttttttttttttgttgttgtttgagacggagtttcactcttgtcgcccaggctggagtgtgatggcgtgatctcagctcactgcaacctccacctcccaggttcaaacaattctcctgcctcagcctcctgagtagctgggattacaggcacctgccaccaggcccggctaatttttttttttttttttttttgagacagagtttcgctcttgttgcccaggctggagtccagtggcgtcatcttggctcactgcaacctccacctcccaggttcaagcaattctcctgcttcagcctcccgagtagctgggatcacaggtacgtgccaccacacctggctaattttgtatttttagtagagatagggtttcaccatgttggtcaggctgctctcaaatgcctgacctcaggtgatccacccgcctcggcctcccaaagtgctgggattacaggcgtgagccaccgtgcccggcctgtattttcttttctttttttttttttttttagtagagatggggtttcaccatattggccaggctggtctcgaactcctgacctcaggtgatccacctgcctcggcctcccaaagtgctgggattacaggtgtgagccaccatgcctgtctccttggtttttttgtttgttttgttttttgttttctttttctttttctttttttttgagatagggtcttgctctgttgcccaggctgcagtgcagtggcatgattgggctcactgaaacctctgcctcccaggttcaagcgattctgctgcctcagtctcccgagtacctgggattacaggcacatgtcatcatgcctggctaatttttatatttttagcagagatggggtttcatcatgtgggccaggctggtctagaactcctgacttcaagtgatatgcccacctcggcctcccaaagtgctgggattacaggcgtgagccaccatgccccagcccagcttctccttctattttaaggctgagtaatattcaattgcatgtatacaatacactttgtttattcattcactttttaggaatagcagggttgcttttcccttttacctactgtgaatatgcttctgtgaacacagatgcataaaactatgctcaagttccggcttttgatcttttgggccatatacccagaggtgaaattgctggatcataagatcattctatttttaatttttttgaggaaccccactactactctctagagcaacttcaccatttaactttcccatcagcaatgcacaagagttccaatgcataagagatcacatggacagctcagcaagctgaataatggccacccaaagaaatacagtctcagctccttgaacttctaaatattaccttacaaataaagtgtctttgtataattttttttgagacagtctcactctgttgcccaggctggagtgcagtggtgcgatctcagctcactgcaacctccgcctcccaggttcaagtgattctcctgcctcagcctcctgagtagctgggattacagacgcccgccgccacacccagctaacttttgcatttttggtagagaccaggtttcaccatgttggccaggctggtctcgaactcctgacctcgagtgatccaccagcctcagcctcccaaagtgctgggattacaggcatgagccaccatacttggccactgtgcagagaatactgtagccacatggaatacatgtggttagggcactgtgttagctagtctgggctgccatagcaaaatactataaattaagcctcctataaacaacagaaatttatttctcacaattctggaggttagaagtccaaggttagaagatcaagttgtcagatgatttgttttcttgtgaggctctgtttcctggcttgtagatgccaccttctcactgtgtcctcacatggttgagagacagcaagttctgtggggtctctgcttataagggcactgtattagtccgttttcacactgctggtaatgacatacctgagactgggcaatttaccaaagaaagaggtttaatggacttacagttccacgtggccggagaagcctcacaatcatggcagaaggtgaaagtcatgtctcatatggcggcagacaagagatgagcttgtgcagggaaactcccctttttaaaaccatcaatcttgtgagaattattcactatcatgagaacagcacaggaaagacctgcctccatgattcaattaccagccgcaatgtccctcccacaacacgtggaaattcatgatgagatttgggtggggacacagccaaaccatatcaggcactaattccatagtgggtccccaccctcatgaccccatgtaacataattacctacaaaaagccccatctccaaatacatcacattggtggttagggcttcaacatatgaattttgggggaacataaacatgcagttcataacaggcattttactgaaaccttgtcatctcccatgccatgagtttagatcaacaaataatcatgcggaaaaaaaatctatatagaaatttcttacagcaaagcctctgctcattttttcgataatctcatttttttaaattgcaaggaacagaaatgaaaaccgatagcttaatctggaaaagaagggttttattaaaaaaacacgtttgcttaatttttggcccaggcagtggggaatctgggaacatctcctaactcaaggtcaagatcagcacatcactgatatccaatgtgaccctcagggtgctgtttcttgctctccgcatggtgggctgcaggtgcctgagccatcttcattctctggctagcaatgttcgtgcaatgtgaggtctccccagctcaaggctcatgccgttcctgcagctgaaagggagagcaacacctccatcctgtaagctccaacagcatcttcccgacagccacgaggagccacatccagttctttcctccatgtttttatgagcgaataggttgactggagtttgaacttctgggttcaaaccctcagaagttcaaggttcaatcccccattgacctattcccacactcgatatccatgataagaatgattctcagggtacattgggcttgttgacaaagaaaggaggattttttataagaatttccatctctgacttttgtccaacaattagattctattccttgtttctaaatgaaaatatgaagaaacacatcctttcggaactaaaataaataacactttgaagttgaaacagagaaaatatgaggctgcacatggaattagtaggaaattatgctctcatttgaggttattctgatttcgccaaggaagatttaagctcaaaaggtaaggtggacagggaatcaccccatggtgagacacatagggatattcgggcatagagtacaagctaattaagcttgatatgtacgaggaatttctcttagtaatcaatgagaatgtgaagtgtacagaaaataacttttgatgaacaaggaagagcacatgaatttacatacaagaaatctttcctcactgggcaaaaagctcattcaatttctttctttttttcaagccagagtctctgtcacccaggcaggagtgcagtggcatgatcttgactcactgcagcctcaacctccttggttcaagagattcttgtacctcagcctcccaactagctgggattacagtcgtgtgtcaccacgtcccactagttttttgaatttttggtagagatgaggttttgctatgttggccaggctggtctcaaactcctggcctcaagtaatcctcccagcttggcctcccaaaatgctggaattacaggtgtgagccatcatgcccagctttattcagttccttaaggaggatgagcagcattgagcggatgggaatgtgccttctctggagacaggtttgcatgtagagatgccatcataatttataaggacaggttttctcttttttcctattttttagagatggtgttttgccatgtttcccaggctagtctccaactcctgggctcaaatgatccacttgccttgacctcccaaagtgctgggattacagatgtgagccactgtgtatggctttcttttttcctttccttttcttttcttttcctttttagacggagtctcactctgtcactcaggctggagtgcagtggtgcgatctcggctcacttcaacctccacctccttggttcaagcgattctcctgcctcagcctaccgagtagctggaactccaggcgcgcaccaccatgcccagctaatttttgtatttttagtagagacagggtttcaccatgctggccaggatggtctccatctcttgaccttgtgatccgcccacctcggcctcccaaagtgctgggattataagcgtgagccaccgcgcccgaccccaggacaggttttctaaggctcatggcccttggccatttgctgcatgatctccatctccatagggctttgtagcagctctcattgcctctcccacaattcatgcatcaggcaatgcccaggaaccacaagagtataattaatattcacattcaaaatcatagttgtttctattcaatgttatagcatgcttttttttttttttttggcttttaatgaaaaaaagcattgatttctgttgtcttggaaatcagaggggtagacctggcttcaacggtggctggatttcagggtccgatgatataagggctcatctctctgtttgcttttggctcttgttcttgtttgttgttgctgctgtggttgttcatttattctgcctggtttttgttctcaggctaataaatgtaggagctctgatgtccactttgcagatgaggacgctgaggcatacagagatcaagtaatttcccttctgaggcagagtccgtggacttcccacagccccatgacacccccttatggctgtgtatccaactcaacattccctgccctgatcagggcgccccctgctgctcacccagagatttgccaggatccctgcaccaatctcctccaccctttttgactcccaaatgcttcttgacacctgactcccaccctgtcactcagagactaacctatgtcaagatttacaaactccccgggtgcggtggctcacgcctgtaatcccagcactttgggagcccgaggcgggcggatcacctgaggtcaggagttcgagacgagcctggccaacatagggaaacccccatctctactaaaaatacaaaaagtagctgggcgttgtggcaggcgcctgcaatcccagctattttgggaggctgaggcgacagaatcgcttgaacctgagagtcagaggttgcagtgagccgagatcgcgccattgcactccagcctggacaacgagagagaaactctgtctcaaaaaagaagaagaaaaaaaaaaaaactaaacaaacaaaaaacaaacccccaaaaacaaagatttacaatcttaccaaacaggaatggtaactacaggaagtagttactatctgaggttattggtaatgttattgctattgttaatgtcacttttttttcccactcccattttctctggaagccgtttgggaggtcctgcctctcaccttctctatccacttcttactcctaccagaggttgtagacaaagatgagggttgatgcattgtgcaactctgtggctccccctagtgatatgatacatttggggtgatggggtttgcctagacagggccccaaggatgctggtagggagcaggtagggaaccccaccttgtgtacagctcctcaaaaatcccaggttaacattccatttggtctccaggcctgataaatggggaggagtggctgttcattagtgtgcactctggctgcaccgggcaggactttgccccgggagggactgtgacgttctgctctcttggtaagaaggtacaaagctgggctccagaaatggattgagagctccttgggtctgctccccaggctgccacccgcccccaggtgagccctggatactgctattcctgactgaagagacagggttttggacaaggtgctccagaaggccagatttctctctgggcaaggttcatgtgtttcccacacaagtctacttctgggattcttcatggatctacaaatcggactaggcaaaagctgtgcatgctgctgtgtatacaaaatagtaaaccctgatatagacgatggactttgggtgctaataccgtatcaatggaggttcatcaagtatgacaaatgtaccactctggtgggagatgctgataatagaggaggttatgcatgtgtgggggcaggtggtatatggagaatctctgtaccttctgctcaatctgtgaacctaaactgctctaaaaattatgtctatcccgtcatatgcttctgggaaaaattgtctatatatattttttaaatggaaagaactggctgggcatagtggctcaagcctacatctcagcacttaaggaggctgaagtgggaggattgcttgagtccatgagtttgagatcagcctgggcaacataggcagactctgtctctacaaaaaaaaaaaaaaaattagctaggcatggtagtgcatgcttgtggtcccagctactcgggaggctgaggcaggaggactgcctgagcctggagggttgaggctgcagtgaaccatgatcatgccactgcactccagcctgggcaacagagcaagaccctgtttcaaaacaaattgaaaaaagcttaatgctcctaaatagggtattggttgaataagtcaacacacatcaaattcagtggaatactatgcagccatgaataattaacagtagtggtgcagagctgttgcttctccagtggggatccaggacccaagggcagggcgtgaaaagtgcttcagaggagctaaaggcagaaggtccactttgcatatcttctggggatgtcatttatactcaaatactgagtcaggtcaatcagacaactttagtgacaatgaatgcattattttcccgttgaaactaacagaaacgtgtttttccataggccacaaacattcatagggactttcagagtaaaacagaagacttcagagatattttgtaattatatctagatacagaagacttgagatattttgtaaatatatgctagacactcagagctgtatattcaccttcctctgattaaatttgcccttaatgtttcagaattcctaataaaggacatttaagaatatgatcccactttggtaaacattatgtatatgtgcatgagtgtatataacacatcaaaactgaaaagagaggatggcagattgcaggcattgttagccggcctctcccaccttggaaagatgaaacagtgtataaagatttatgttgtgaccttttcaccagggaccaacacaggaacttaacaggaaaactggaagaaaccacagacctttctaaagaaacggtgggcagcagcctacaccacgagccagacagaaaactgtgagtccccacagtgtgagaaggggagagactgactcagggatgtgcactcccactggggtgccacgcagtccaggccacaggagggggaagccctcaccctgcccagcactggagctgagttagggagcgttggggagtagataaggagtcacattgggatgtgcttggcgtgcagtcctgggctccagcagggacagagggaagccattcccgatgctacctcacagggggccttgcagaagccagctagctgactcaggaggcggtcacgggttgagagaagctcccgactgagatctgcaatgtcatcttgagtggggaaagtagacttgcccgaaatctaagactcataggtgttcttgagggagaagaaaaagcaaaaagttgagaaaattcaatgattggaaagatacagaatcaacctaagtgctcttcaacccgaaggaaaggctacaaaagaatacacatccctgagtcagtctctccccttctcacactgtggggactcacagttttctgcctggctcgtggtgtaggctgctgcccaccgcttctttagaaaggtctgtggtttcttccagttttcctgtgaagtctctgtgttgctccctggtgcagctgcagcgtaagtaggttagacaggcgtttcacagcctcccttacacagcctcccttaaagggaaacacatttgctaaatagacggagagaacaatccgccggacagctcgcaaaccccgacagcgcataaaccgcatcctgggctcgtggtcaaaacatcctgtagcaaggaggtagaagggaagaagggacagtccccatatccgtgcaagtgcagaaacccatgcttaggtagtgtccttgggctgacctatgctcattataatagtgaaaacacaccctcacgtggagacttaaggtgctactgagacagcgatgtatatgcactagcatgtacagccattgcgcatgcgggcctaacagaccacccagaacacgcttaagagcaacaccgtcccacccacgcatgagtaatcacggaagattcccctaaagggagtttccccagcgtcagtcagcgctgtctcacctttgagcagccgctctgaccagctgttaagagtgcacgttcactttgcaattaactctcttgcttacttttaccttggactcactctcgaattcttttcttgaggcaaagtcaagaaccggaactggcccaccagccatagcaggggagactgtgtgtgccgcggtgcaggcagcactcatgccgggaatggtgaggatggcaccagcttgtcggattttttgttggcatttgtgtttgtttctctactcaccacccaagtgataaaataggatccttggtgtggaacttagaattatgccaaaaagctaacagttctcctttctagccagctacaaagccagaccatgcccaccactgccatgcttgcaaaacgggtcaccacggcctgtaggtgagcagttgtgtaggagaaaagaatccaatttttttgtgtgctctttactattatgtagacagctccgtcttcagcccacactttggttccctgtggatttcagtttgtgtcctgtgtctgaggacagcggactgaatacagtgattttttacctccaataaatgtcatcccgctgcccttcctgtgcctcgagggttgtctgtttttctctttctttttctttctttctctttctttctttcttgcttacttttctttctttccttccttccttccttttctttctttcttgtctccttccttccttccttaactccttctttctttttgacagagtcttgctctgtcactcaggctgaagtgcagtggcattatcccagctcactgcaacctccaccttccaggttcaagcgattctcctgcctcagcctcccgagtagctgggattacaggcgctcgccaccacgcccagctaattttttgcatttttagtagagacggggtttctccatggtgcccaggattgtcttgatctcttgacctcgtgatctgcctacctcggcctcccaaagtgctgggattacaggtgtgagccaccgcacccggccctgtttttcactttctttttttttttttccacaggattaaaattatttattgaatagacatttatggagcatctattataacaggaaaaagtaccaggccctgaagacacaagaataaaatcaagcgtttacaacttacaaaaggagaaagacaagtacaccacagtgtacagcaatatttatagtactgacataaagtagtcatagatatggtgttcgggggagcagtgaaggacaaggaccaggacagggaactccattttgagcagagtattaaaagatgactaggataaaatcttaaagaaacgatatgctatgcattccatgaaaacaaaacgaaaaacaccagtgtgctctgcctatcaggattcaagctgccttgtaaatattactaattattcatattaggaacacactagtcaactccattaaaaagccactttccatccctgcataatggtagctctatgaatttgtgattcagaccatattccctcaaacaaatgcattactaaactttgactagacatcagaattgttaaacaataacaaaataaaattgaacaactgaataaagctgaagccctgaacagcctaactggaaaaggagaagaccctttaattggtcatatacacctcttgacctgtatttggcaatctgctctccgaccgtcaacagataagcagcacagccctcaaggttggagactgatctttggtaaagcaggcatccatcccagatgctgctgtctcccgtacacagccctcagagccaagggaggcctggaacctgagaagtttatttccaattaggacagttgcctatacttctcattcgaagcatccagagacaagggccagcccaacccccaatgccaggagccaaggcagcattatcttctgtatgagttcctgacccagaggtgacctgcacgatttcttctgtgtccgctgagggccatggaagaattttctcagctcggctattatgtaaactctaatcttaccagtggcaacatggcaaccacaaatcccaagtcccaggaggattatacttaatggagagaactcactggtctattgggactattggcactgcaaaaatgccataaagagctatttatgacaaacccacagccaatatcatactgaatgggcaaaaactggaagcattccctttgaaaactggcacaggacagggatgccctctctcaccactcctattcaacatagtgttggaagttctggccagggcaatcaggcaggagaaagaaataaggggtattcgattaggaaaaaaggaagtcaaattgtccctttttgcagatgacatgattgtaaatttagaaaaccccattgtctcagcccaaaatctccttaagctgataagcaacttcagcaaagtctcaggatacaaaatcaatgtgcaaaaatcacaagcattcttatacaccaataacagacaaacagagagccaaatcatgagtgaactcccattcacaattgcttcaaagagaataaaatacctaggaatccaacttataagggatatgaaggacctcttcaaggagaactacaaaccactgctcaacgaaataaaagaggacacaaacaaatggaagaacattccatgctcatggataggaagaatcaatatcatgaaaatggccataccgcccaaggtgatttatagattcaatgccatccccatcaagctaccaatgactttcttcacataattggaaaaaaagtactttaaagttcatacggaaccaaaaaagagccctcattgccaagacaatcctaagccaaaagaacaaagatggaggcatcacactacctgacttcaaactatactacagggctacagtaaccaaaacagcattatactggtaccaaaacagagatatagaccaatggaacagaacagagccctgagaaataataccacacatctacaaccatctgatctttgacaaacctgacaaaaacaagaaatggggaaaggattccctgtttaataaatggtgctgggaaaactggctagccttatgtagaaagctgaaactggatccattccttacaccttatacaaaaattaattcaagatggattaaagacttacatgttagacctaaaaccataaaaaccctagaagaaaacctaggcaataccattcaggacataggcatgggcaaggacttcatgtctaaaacaccaaaagcaatggcaacaaaagccaaaattgacaaatgggatcgaattaaactaaagagcttttgcacagcaaaagaaactaccatcagagtgaacaggcaacctaaagaatgggagaaaatttttgtaatctactcatctgacaaacagctaatatccagaatctacaaagaactcaaacaaatttacaagaaaaaaacaaacaaccccatcaacaagtgggcgaaggatatgaatagacagttctcaaaagaagacatttatgcagctaacagacacatgagaaaatgctcatcatcactggccatcagagaaatgcaaatcaaaaccacaatgagataccatctcacaccagttggaatggcgatcactaaaaagtcaggaaacaacaggtgctggagtggacgtggagaaataggaacacttttacactgtttgtgggactgtaaactggttcaaccattgtggaagacagtgtggcaatttctcaaggatctagaactagaaataccatttgacccagccatcccattactgggtatatacccaaaggattataaatcatgctgctataaaggcacatgcacacatatatttattgcagcactattcacaatagcaaatacttggaaccaaaccaagtgtccatcaatgatagactggattaagaaaatgtggcacatatacaccatggaatactatgtttttcactttcactgtggttgtttggcaactgaatccactcaatatgcaatagacaagacagagatcgagagaaggagaaatgagaagcccatgtgggagcagaggctgcaataggaaaggatgaagcctgtttttgtggatccccctcactcccctgatgaatcccttcttcagctactggtttaggcgactgctgatgaaacccagaagaggaagactgggtttgtccgtatgaggcccctctcatcaggctggaacttggtaactggctttcacttatttatttggagtctgaaaggaatcaacagctcttttgggaccaatggggcaaatggaacctacacaaaccaatcgcttgcagcaagccgtgttttatagatctataaatctataaaacatttacaaatgcaatgtttttaatatatttataaatatataaatttggattttccaaatcaggtgaagctctcctcagtccccacctgtataactaaagaaagatgtgtggctatgcaaagaagccaaacgtcattaccttcctgtagaattagggtttttgttaataatacttcgcaatttctaagaagttgtttgggatattacatgggttattaaaattctgtgtactgagttatttttcaatcatgaaggaaaaaaaaagtcaatccactgaacaagaatttaccaagcagtcatttcagggagttcccgttgaacctgtgattcggtagtgcactcccttgatcacagcagggacgtttaaagagaaagacattttggtctggattagctctaacgctagacactgaagttacaagaaatctgtatactgaatggcaaaggcgacttccagtacactccccgctgtctgggaagaggcatcctttgaccgttttagcaaatctgtttatgtgtctgtgcacgtgtgcacgtgcatgcctgtgtcaaaattgggagtgttgcttaggcagtgtaacgtttcacagttgtgtgcagcaaacaagctggtttttagaaactagcagccagcgtttcagggaggagggagagctgccacagggtcctccctgtgggttactatgaatgcactgtatattggagaatatctcgatccaaacaacagtcattcctgagtggtccttttgtatctggaattggttccttctggtgggttcttggtctcgctgacttcaagaatgaagctgcagaccctcgcggtgagtgttatagttcttaaagaatggtgtgtccagagtttgttccttcagatgttcagatgtgtccggagtttctttcttccagtgggttcgtggtctcgctgacttcaggagtgaatccgcagacctttgcagtgagtgttacagctcttaaagatggcacgtccggaattctttgttcctcccagtgggttcctggtctcgctggcttcaggagtgaagctgcagacctctgcagtgttacagctcataaaggtagtgcggacccaaacagcgagcagctgcaagatttattctgaacagtgaaagaacaaggattccacaacatggaaggggacctgagcgggttcctgctactgactagggtggccagtgtttattcccttctttggccccacccacatcctgctgattggtccattttacagagtgctgattggtccattttacagagtgctgattggtccattttacagagtgcttagtggtctgtttttacagagtgctgattggtgcatttacaaacctttagctagacacagagcactgattggtgcgtttttacagagtgctgactggtgcatttttacagagtgctgattggtgtgtttacaaacctttagctagagacagagtgctgattggtgcatttttacagagtgctgattggtgcgtttacaaacctttagctagacagaaaagttctccaagtccctactggacccaggaagtccggctcgcttcacctctcactttgttgctctcctgttttaattttattttgaaactcttgggtgcgtcagggtcttggtactgatttattgttgttgatccagccaaattagccatgtaaaaatagcacctgtgtaagagacgagcagcatcttggtagcctgatactttgggcagcttgatgctgatggtggtgtgtgggaagagaggggataccaatcacaagataggagaggagggcctggcccttgggcacctctgggaaagcgtagggaacacgaggcagccagcccctggcaggggagactgtgtgtgccgtggtgcggtgcaggcagcactcatgccgggaatggtcaggatggcaccagcttattggattttttgttggcatttatgtttgtctctgtactcaccacccaagtgataaaataggatccttggtgcggaacttaaaattatgccagaaagctagcagttctcctccttggggacttgtcttaaacttgcctggtttgtacgtttctggccggacacgtgaagaagcaatctgtgacaagtctgagggtcttcctttcaacctgcctcccacgcgaagaaaagtcggtgtttcccttctgggaactgttgtgaatttctctttatctgtgaactgttttggttttgtttttaattgctctgtactccctctgaatcaaggcttctaccactgccggtgaaaaccacaaagggatctgcttgaggcgccatcctggccaagagagcaaacctgcaggaggtttggaaatggactcagtctctgcaaaagcgtgtgcactattaggggatgaactgtgtcacagccaggggcacaaagctcgtgttgtaggtgatccaggagacgtgagttcccagagattgttttgtgcattcatttgcacactgttgtcggggttggacttgtgtttcaggcttcaatgtgaggctcgtgatatgcatgtcctgtttatcagtaaaaaaaagttatcaaagtggttgaatcctgtgacttggcaagtatgtgagaatccagtacacatgactcttcaacttcttcctttaatgtcacttttataggaaatagaagtaaccaatatgacagttctcaaaaaaataaaacaaaataaaaattaggtcctgagcaggaaaaccaaatgaaaaaagtggaaacagggcacctggaaatctaaggctttgctgtgcttttctgtatttcccaattttcccaacagtgagctttgatttttgtgtttttgtttgttttcttgcttgttttataaccaggtcaaaacaatgtaagcaaatataaaaataaataaataataaactaaaggaaacataaagtgagtgctgggtgagaggtgcctctgttcccctgattaaggcaccctttgtgccttggggcagctgcctggattcgacctggaccctctacttgctggcctgtgtggtgctgagcagcttacccgggctcctctgtgacctgggtagagccagccctcttgagagtcactctgaggcctgcagagacaggatgggtccagttcccagtgcatagcaggtgccagcaggtgtgttggtgtcaggtgtgttggcttcttagggcttccatatcaaattcccacaaacttggtgacttaaagccacagaaatttattctttgacgttatgaaggccaaatgtcccaagtcatggtgtcattgggctgtctccctcggaaagtgctgggaagactcttcctggcgtcttctagcttctgggggctgtggcagcaaaaccccaacctctgcctccgctgtcacgtggccttcctccctatgtgtgtcttgtgttcaatttcccttattgcattaggacaccagtcatggcacttagggcccacctcatacagtatgacctcctaatattagcttggctacatctgcaaagactatttccaaataaagccacagacatagatactgggagttaggacttgaacatatctctctgggggacaagattcaacccacaacaactccattatcaggatgatgagaccctctgatgtttcctgtgtccatctccagcccctccctctgtccctcctgagctgctgaatgtcatctccacaggacatcctggatactctcgaaaggccagcatgggaatccaacctcattgttcctatctcagccctgccccaaatcctagagagaaatggaaacatctcaatacactatcatacaaatatgttcacagcagctgtcttgataattgccacaaccaaaacagtatcaatgaataggaaaaaataagggaatgaattgtgatttgctcatacaatgcaatggtgtcctactcagcaataaagaggaaaagatactgacacacacagcatggatgaatctcaaaacatgcaatgcggccgggtgcggtggctcatgcctgtaatcccagcactttgggaggccgaggtgggtggatcacaaggtcaggagatcgagactatcctggccaacatggtgaaaccatgtctctactaaaaatacaaaaattagctgggtgtggtggcgtgcgcctgtagttccagctactcaggaggctgaggcaggagaatcacttgaactcgggaggtggaggctgcagtgagccgagatcacgccactgcactccagcctgggagacagagtgagactctgtcttcaacaacaacaacaacaacaacaacaacaacgcaacactgagtgaaaaacaaaagacacaagaatacacattgggtgatgccaattatatgaagttcaagggacatggaaaataatatctggtgataggaatcagaaagtggtggctctcagggctagggattgactgggaaggacaccaggatctttctggagtgaaggaaaatttctctatccttgattgagaagctggttacacaggggtgcatgtttggcaacactcatggcatggcacatgtaagagctgcgtgattcaactgaaaagctaacgctatttttaaatttcaaagaacaatgtgttagcctgttttcacactgctattaagaaatacctgagactgagtaatttataaatgaaagaggtgtaattgactcacagttccacatggcgggggaggcctcaggaaacttacaatcatggcggaaggggaaccaggcacatcttacatggtggcaggcaagagagaagagcaggggaaaccaccacttacaaaaccatcagatctcgtgataactcactcactatcagaacagcatgggggaaccacccccatgatcctatcacctcccaccaggtccctcccccaacacatggggattataattctgattacaattctagataagatttgggtggggacacagccaaaccatatcaaacaaacaacctgcaataaaaaaaaacgttttaaattgggggtaaacaaaataagtacagacccgccatacaggttgggcagggggtcccggccttcatctcctcagtgcacctgtcttgttcctgagactctaggccattgctgctccctcttttgtaaaagtcaatgccctcaaggaatttatttcctgaaaacttatggctaaggggtgcccagcctgctgattgcttgactcagtgctagatgagagaagagacctcagaatcggacaggctttaaattccagccctgtcctgagtagccgagtggccttgagagagacccagtgagatttccacacccggatacatcgtggaaccatcaaggcacaatgattagcacacccatctgtgcaaatatttatctgtttttgtgagaccatttaaaatcttcttttagctccttgaaaatattcaatgcaagctgggtgcggtggctcatgcctgaaatcccagcactttgggaggccaaggcaggcagatcacttgaggtcaggagtttgagactagcctggcccacttatagtgaaaccccgtctctactaaaaaatacaaaaattagctgggcgtggtgacacacgcctgtagtaccagctacttgggaagctgaggcaggagaatcgtttgaacccaggaggtggaggttgcagtgagcagagattgaaccactgcactccagcctgggcaacagagcgaaactccatctctcaaagaaaaaaaaatattcagtgcttgattctgtcatttgagagaacatggatgaacctaggggatatttttttgtgtaaaatgagccacacacagagaggcaagtaccacatgacctcatctctatgtggaatctaaaatagtcaacctcagagaggtcgagaggagaatggtgggtagtagaagctagaggcagggatgggtccctggtagccggggaaaggggagacattggtccaagttttggttagacaggaggagggagccctggtgacctactgcatagcatggggctctagagggttcttgttctatgagaatcagcctctgacttctttgctggaggggttgtgattcctcaaacaggcctgagtctctgcagtttctcgcttgtggatcttgatctccgagtattcactgtcagtggcctcctgtccctgcgggtcctgaggcttcactttatggaagctgagggttgcataatggagctctccttcctcccctgacgagggggcaacagctgggggaggcttcttcagggggttgccatctttccaggattcagtcaggggtccctggacagagagagagaagggagtcagaacagagcagtggggccaggatgaggcagggagagtccaggaaggaggcccaggaggtccgtcctccattcatcccacctgcatttttgtcgaagtgtctttcatgctttcctccaacatttaacacttactgagcacctgtttggtgtttactaatctcattaacttcccgcaacaactccatagtgagatattattattatctccactttataaatatgaaaactgaggtcgaaacagtcagcactgcgcccaaagtccctgttgcagcaggacccaatccatctgttccttctgaccccaaagcctggagtcctgctgaggcccccgtgtgtgaggccctgagccggtgctggataaactatgatggacatggtaggtgtgggccctgacctcctgcagctcagtttttgttttgttttgttttgttttttggttttttttttgagacagagtctggctctgttgcccaggctggagtgcagtggtgcaatcccagctcactgcaccctccacttcctgggctcaagggatcattccatctcagccccccaagtagctgggactgcaggaactcaccaccatgcctggttaagttttgcatttttttgtagagatgggatctcattatgttgcccaggctggtctcaaactcctgggctcaagcgatcctcctaccttggcctcccaaagtggcagctcagtctttaattgagggaggtggcaacaaatgactgttaaagaaatgaatatcagcttgggtgcggtggctcatgcccctaatcctaacactttgggaggctgaggcgggcggatcacgaggtcaggagttcgagaccagctggccgacatggtgaaaccccgtctctactaaaaatacaaaaattagcctggcttggtggcgcgtgcctgtaatcctggctacttgggaggctgaggcaggagaattgcttgaacctgggaggcagaggttgcagtgagccgagattgccccactgcactccagcctaggtgacagagcaagattctgcctcgagaaaaaaataaaaataagaaatgagtatctacatgtaaattatgatacaacgggcaaaacgagagtaaatgagagagaattacagggccttaattgagacatgatacctgacctggggaagctcacaggttagtggcgtaaggatgacaagccggtcaaagaaatcaggtcccgccaataggaaaaataatgagaggggtcaggatggctggggccagggagaagagatgccagctattcttggggaggaaaaatggaggagagatggtgaatcggggctatagagaagaaaaggaggacagagaggagataactcctactcagtgcctggcctgggaaaaattgggggtagggactgccatgctgtcagcaagatgggggagtcctgtagaagccggcctgtgggaaggaggaggagacgaggaagtgactttggccataccaaagagagcgatcctgggggccatcctgtcagaggtgtccaggctggatgctcggtgtggagaagcccacatcactcacctgagaggccgagcccctgatggcctttgcatcttccatgcctgtatcccccacgcccgctgctggccttgccgatttcttcctgcaggacctcactctgagtgaagagaccagagagcctttcagtgtggtcagatcggggtgcagtgggcagaccaacccctgccctgtatttcctactgggggcttgaggggtgaccgaggcgcaacggcggtggtccagttccagagaccccaacggtgaaaacagaggctcctgcctcatggatggtggggcccgaggttgctacagatgtggagccccacagacaaggacgctcgtgaaatgctcaccgtgcacccgtgagctcattcttgccccaagccctggacccatccaggtccttccagctctggcttcagggattctgttcccggtctgccctgccccaggtctctctctccctccccagggtcaatgctcacatgatgaagatgatgcagaaggacaggaaggccagggctgtggctccagctcccccgactgctgccagtgtcacttgtgatacaggtcttgaggtgcctgcagatggattggagttgctttggggatttatatcacggagaagtgggtctcttcccctcccactgtctgcagggccctagacttccattcccctcttctccttcccagacacagaatacgaatgggagggaggaaaggagactacttctgaggccagtgaggcatgagagtgctggatgcagcttgtcttgcctttatttacaattttgatattgtgttcttgtggaatcattttgcattcaattttagttttttcaaaagatcatggcattgcaatattactttacttgctttctgagttgggtttttctttggcttcttaaatttggtgccaaggcaagtgcctcatgtgcctcatcctagtctaagcactgcaaagcaaggcgcttgtccctccaaacacacctggccgggccccagctcctcccctccaagacccactcctcccctctccccaccccgcacccctttcctggcggggagaggacagtgatgctctgggtcgcagggaagttccaggcctcacagctgagcacagaccagagctgagctcccccttgaagctcaggggcagtgggtggtccatgagggtggggcaggtgtgttctcctcctccagcccctcccttacccacctgtgccctcattctgcagggagaggctcagggaaatgtgctgggagccctgagcgttctgagctcggcaggtgaattccccttcatccctcacgtgcactcgaggcagctccagcagcccagggtttgaggaccgtgaggggcacagggtcaggctcccccgggtccagctcagcctggcagggggattgctgttgacagcacagaccaggcgcagagactggccctcaaggactgaaagagatgagccatttcccagggctgtggatgctgcagagaaagagacagagggtcatcccattactgggtatatacccaaaggattataaatcatgctgctataaagacacatgcacatgtatgtttattgtggcactattcacaatagcaaagacttggaaccagcccaaatgtccaacaatgatagactggattaagaaaatgtggcacatatacaccatggaatactatgcagccacaaaaaatgatgagttcatgtcctttgtagggacatggatgaagctggaaaccatcattctcagcaaactattgcaaggacaaaaaaacaaacaccgcatgttctcactcataagtgggaactgaacaatgagaacacatggacacaggaaggggaacatcacacaccggggactgttgtggggtggggggagggatagcattaggagatatacctaatgctaaatgacaagttactgggggcagcacaccaacatggcacatgtatacatatgtaacaaacctgcacgttgtgcacatgtatcctaaaacttaaagtataataataataataataataaaaggagacagagggtcagagagacaaatggatccagagaaagaggaaggacacagaaagagactagtgagagggactgacacacagacatagactgaagtgcaggaaaacgcacactcagtgctgggaatgtaaacttgtccacttttaattgagaacaacttcactgcatctttcaaaattagaaacaacatacgacactggtatattttgcttttaggaatttatcccatacacttagatattcctgtggaagtagatacaagactatccactgcacagtttctgcggaaggatatttgtgccatgattttccttaagggatgccacaaagtcagagtccatctgtgcagtgaaatcacacacggtcctagaggacggggtggacagtctcactacgatgtcaaaccacctctgagatcctccaggtgcacaaaccaagactcagggcagcctggacggacgctggtcagttccgtggagggggatgggcactggaggacagactttgctgtgcattttgaatttctgcccatgtgactgtatcatctgggcagaagtacttagatcgaaactactgggaaaacagaaagatcagacagaggaagtattcaggagatgcctgacaagaaacttgaaagtctggtcccaaaataaaaacgaacaaaaaccaaaaaaattgggagtctgatccagctgtgtgaatgtcaccctgtccttgctgtggggccaaggaaggggtgtgtggaggagtctaaggggagcagggacaggatggggacaggggctcagatggtcacgcgggctggagatgtgggctcttgtgccctgggctcacgcacagtggcagctctgtttcccaaagtgattccaggatgaggagagacccagccccatcctgagctgaaggccctgctcccccaaccccagggagggggctctgtcctacctgtggcatctccttggaagacagtcatggtcaagttccaaggagggtctgggacagaaagacatgaagacccacattactataaggactggggacattggccctgtcttcccaggagctgcaaatacagggaaaatggagtcggcattctcctgaccccactcccagcccagattctgggacccagaacccagtgtccaggcttgaaccccatcccctgccctcaggaacacctcccaacccatgagggacctgggcatcttggtccagcactcacaggacacatcgaggcggacggtactggtcgtggtcacacctgtcccaggcaaggtcacctgacaggtgaggctggtgccgtggtcctggggctttggggtaagggtgagcactgaggagcgggcagtagtggggcccggggaggacacggaggccccaatccaggagatcatggggggtgtcccctgcttacaggcccagggcacagagcaggtcaggttcctggagtggccagactctagggtccctaggatgaggatgtcaggcctatgggtcagggctggtgaagatggggacacaggatcaggaggaggtatttcaggtgcagccctggaggaagctcaagctctggtccagctcctccccggagaccgacttatttcaatcccaaccccctcccaggccccatcccagccctgcctttcagcccctcatgaccttcccctgtggcctgtgctggagcccgtgccttacctgtcacaaacacagacagctgcttagttttgtaattcaactgtgatttgtaactccatttcatgcttcctctctctagccgaaagaaatatgaccccttatccctcttcctggcgtctctgatgctcagggagcagtcgttgctccaaatgtccccaaggagttggaatcggccctgggtctctgcctgcacttctctgtctgggttgtttgtggccactggagcgtcttggtatggtctgtctcctgcccggaaccagtagccatgaactgggtcagagtcagtccagccatcctgggggtaggagaaggagcagggcacatggacacacaggccctcctgcaccgtcaccagctcctgcacttgcagcaagtaaccatccccatattgtctgtctccctccatcccctttgtcccccagagcaggggcagcagcagcagcagcagcagcatgtctgggtttgaaggcgccagggccgccagggaacgtctgttcctcagggttcttctctcagaaactgaggtctcaagacttaggggaggtcccgcaggaggttgggggtgaagtcagaaaagtgacctcctcagaggaggaacttcacacacagacactgtcagggccgggtcagtcctgggagatccactgtccaccaccccatttccactcctgggaaccctgaggccagagagggtgagaaactcatccagattcccaccctatgcagggcccaacctctttcttgcttcccggacttgcccttccatttgggtaacattttctgcaaggtgaaattgggtcccatctggccagacccctgaatcacccccggggctgtcactgtttgtggaggtcataccagccaaaggtggaactcagggccatgagagactggggtgcaggtgaggtgagcaggcagcctctcctccctctctcagcagcaacgaagtgggcacctcctctttacacaacgaggtcaacagagcagagccagacactgtcctcaaggagtcactgtgcagaggggagacacggaggctcctgacgtctgagctccccaggacgggagcttcagtggggggcacaggcaaggtggggtcgttctcccctaggtcaggggttcagtctcaggaggcctgagcagagggacacggggctgtggaggtgaggattctgcatgttgatacacacgaaggacggggggcggggggaagcctggctcgcaggaggcctgggaaactgaggctgtaactgttgtactgtggggtttggaagggagaaatgtcagaagggaaagggtcaatttgaaaagggcacacacttctccctttgttgcagctatctgggtatcagaatgggtttcttcaccacccgtatcttactcagccacacttcccctggttactgcacagcaggcggggtctgtcagccctggggctttgctcctgcaggctctgcttccaggggtccaggtgaacaggtgtcatggaacgaggacaccagccctggggtgtgcaccttcagcgatgggcaggatttcttgagagaagaaatgtgcacctgaattcaacagatgatgatgatgatgatgatgatgatgatgattattattattattattattattattatttgagacggagtctctctctgtcgccaggctggagtgcagtggcgcgatcccggctcactgcaacctctgactccctggttcaagcgattctcctgcctcagcctcccaagtagctaggattacaggcatacgccaccacatccagctaatttttgtatttttagtagagccggggtttcaccatgtcgaccaggatggtctggatctcctgacctcatgatccacccacctcagcctcccaaagtgctgggattacaggtgtgagccaccgtgcctggcctcaacagattattttaaactgtgtggctgggggctgggaagaagttaagggggatcctgggaggcggagcctccttagactcaggtcaattttcttgaaacattttttggggggtaaatataagaaatatagataaaaacaacccccaaagaagacctcagtgatttacatacaacgagccccctcctagaaatggcacattgacaaagtccccagcgctgctcatttgtttctccttcttattggccacaccccactccctcccaaacgatcccctagcctcactttggtgcaaattgcctcaatgcttttctatatagttttattatctgagcaggctgcatttactaagcttttgcacgtttttctgaagactttgtatacacagaaaatcaaactctactttcttccactcagcttcatggatctgcccgtctcctatcttcccctcattacttataacctggagtagatcattcggctgtgataattgagaagggaaggtgcagggcttgggtgtgcatagccgactcccacccccatcaccaatgcttgcatttgtagctggtatctcattctgcagccatttccccctcctgggcctcctatccttgcccagtagagacagctgcagtatctcaatagtcagaagggccgagccatggcacaggtcttttccatggtccccaagtggtaattgaagccttcagtgaagactcctgtgcaggccttgctctccagcaacttagccaggctggaactacaattcccagaatccccttccctgtttgcttcctggacaaagttcaccacaagggaagggggaagttggagcagcagccctgaggggtccgtgtaggggcaggagctgttgcagctctcacatattgacgctgaccactggcccatctcatagggagacacgatagccgctcacttgttcacctgctggacggcaaggagggcgtgtgggacaccacgggctatgccttagggagcagagaatcattgaatcctgacatggggattggtgacccacatggacacaggtggcccagagagacacatacagtgacaggcaagggatccataaaatggcatcccaaatagttctctcatcctaagacgatgtcccagggtctctttgacctgacaactagcgccattcaccttttcaggggagacccagcttcccagggcaaagggaaggacacagcgcatctcagtacccagaatgcccaatgcttgggtgtgtgtgtgtgtgtgtgtgtgtgtgtgtgtgtgtgtgtgattgagagagagagagagacagagagagagagaccctgtgtgtgagggagagggagtgtctgtgtgtacctgtgtgtttctgtgtatgagctgagcactgcctccttgggcagtgtgacagttaatttgatgtgtcagcttcactgccctgggaacccccattcgtgtgtcctttcataacctcattccttacccttcacatgcacatagagcatttctgtaattacattcacatagatctcccttttctccctaaagaggtctgtccctgcatctcgcctctgtgtgtctctgacgtccagaaagcaggtgctggcctggggtctgaagcaggtggaattggctctgggtctcctcctgctcttttccaactagattgcttccagccacttgaggatcctgatggaaatgtcccctttctgggacagtagccttggacagggctggagtcagacaggtacccacaggggtggaagatggagcagtgcgtagtcacagaaaccctcctgcacctgcaccaactctggggcttcctgccgggatctcatatcctgagccagatcccctgtggggaaatgagggtcagcccagcccagccccatggttcctctccctgaggcccattctcctgcccacagcaggggcagcagctattgcagcgtgagcttctttagggtgagccttggtgtcgcagggccctagaagggccccacaggaagcctgggggtaagatcagaaaaataactgaccacaaaagaggaccttggccccgacactgccagagctgtcagggctcctggggagtggccatttctactctccggatgggtcttcagtgtgggccacacacagcagggaggccccgacccacagctgcaggctctctgcccacagcctttccctcccacagcactgtccacaccagggaagcaggcactgcctgtccattacagcttctaggtgctcgggagggtcagtcctgccagagctgggactcaggaggggctggcggaggaaccacgaggcatgagagatggggaggggtcccccgaggcgggagaggtgatgtttaatgaatgagcacaatcaccacatcaggagcatctcctcctttcagggggatggaggcaaaggggagagtgtgacagactctgtctccttccttgggaagttccctaatgaacgagggggcagaggagccctgggccaccccagctcctgttagtaagggctgtgatgcttgaaacacaggcagggcttgtggaaccccgagggccctgtgcagctagaaggtgcggtctcaggtatactcgggcagagtggacgggaccaggactctgaggtgctgtgagcatgcggccccacaggtggtccccagccttcctaaccttctcagtgccccctgcccagcatgcctggtggtgactgcacagccgaggccctgtgagcccagcatggggagcaaggctgagcccaagatgctaggggaggccctggctctggagtgtgagggtcctgggccctctccctccaagtctcagtctcctcatctgtcccctggagggatcacagcacccacccctcagcctgagggagaacccagctcgaggaggcgacgttctctgcagactcaggcatggccaacatgctctgtgtccctgggcaggcccgaagcatccacgtgtctggccctaaccattctcaggggtcactcggagtcctgccctcagtaaggagctcctggtggtccacactgctctggggcttcctcagctgaggcctcacagagagagttcaggggtacaggctctgtagctggatggctgctggcttgagctgggctctgtaaaacccacggtgctgtcttgggagggggcttacctgcactgtgcatcgtcggatgtcaacacttacggggtgtcagggatgaactgtgtcccctacaaattcctatgctgaagtcctaacccccagcacctcagaaagtgaccatatttggagacgaggacttataaaaaggtgactaagttaaaatgaagttgttagctctcatcctacatgagctgtgtctttattagaaggggtgattaggggtggagtgtggtggctcaggcctgtaatcccagcacttccggagaccgacacgggcagatgacttgaggtcaggagttggagaccagcttgaccagcatggtgaaaccccgtctctactaaaaatacaaaaattatccagacgtggtggcatgtgcctgtaatcccagctactccagatgctgaggcggaagaattgcttgaacccgggagacggtggctgccgtgagccaaaatggtgccactgcactccagcctgggcgacagagtgaggctctgtctcaaaaaaaaaaaaaaaaaaaaaaaaaaggtgtgattaggacagcgacatactcgggagaaagaccacgtgggacacagggagaagatgccacccgcaagccaccgagaggcctcagaaggaagcaacgctgaccacagcttggtctcagacttccagcctccagaagggtgggaaaacaaaggcgttggtgaagccactcggtctgtgttcctttctcaaggcggccctggcaagagagtccatggagtggtcgagaggattcgatgtgttcctgtgagcacagcccggtgtggaccgcggtggatgcagagtcccacaggggtctgggacagcctgtaacatgggatgctcagaggatggaaggagaaaagggaagggaagggctcctcaccagaggaaacctgtgctgctgccgccctgtctctgacatctgcagggctgccccctccacccacactctccctccctccccaggaccgggcagggctctcagccgcagcccctcgctgcccctgcaccctgggcagttgcctcccatctatggggcggagccgcctgggcgtctgggctgggcgaggcggagcctggaggggcaccggccacgggcaggggagacagaggcgggcacagcctggcggggtccgggctgagccagcggggaggacggggctgtgggagcccagcggagagggtgaggatccgcgggcaggtgggacaggtgagctgggaggtgagagatgggcagggctgcctgaaaggcaagttcatcccagagcagcgagcagggcgcagccaaaggccgtgggggaaacagcggcgagaaaaaaacggccaaaattctgcccgcagtgcgcctgtatcctagtgcggcggccacaaaaatattgttgagtagcaagaagtgtttcgaaagtgtgcagtgggtaaagtgtgagaaaataaagccgatttcatcgagaaaaagagagacagagagagaaagggcccatatcaacccaaagtcattactcttcatcacgattatattgcatttttcccatctactacagcgttaacttcatataaactttatgaagacataccttacgtataataaaaagcacacattgtaagcatacagttaaattagttttggcaaatgtaaacaccctgtaactatgtcctcaatcaagatagggaatctttttttcatccctccaagctttcttattttctttcttttctttttttttttttttttttttttgagacggagtctcgctctgtcgcccaggctggagtgcagtggcgcgatctcggctcactgccagctctgcctcccgggttcacgccattctcctgcctcagcctcccgagtagctgggactacaggcgcccgccaccacgcctggctaatttttgtattttttagtagagacggggtttcaccttgttagccaggatggtctcgatctcctgacctcgtgatccacccgcctcggcctcccaaagtggtgggattacaggcgtgagccaccgcgcctggcgctttcttattttctatcccagtcagtgtttcacttgcagccatcacttacgtgattctcatcactatctattagttttttctattctggagcttcatataaattgactcacacaatatttatgtatctggcttctatcagtttgttaaagacgtgtatacgttaaatgtatatgcacccaataacagagcatcgtttatcaaaatgtcaagtatcttacctgactatagttgaaaacaactcaaaaccagtaacaagaggaacattagaaactacacaaatatattaaaattaaacgacatgcttctgaacaaccaatgagtgaagaacaaagctaaaattgaaatttaaaaattcattgaacaaattaaaatagaaacacaacatgccaaaaactataggacagagaaaattaagtattaagaggtaagtttatagcaataaatgtttacaggaaagactagaaagatttcaaataaacaacaatgcatctcaagaaactagaaaagcaagaacaaagcaaacccaaaattagtagaaaaaaagaaataatagggccgggcgcggtggctcatgcctgtaatcccagcactttgggaggctgaggagggtagatcacctgaggtcgggagtttgagaccagcctgaccaacttggagaaaccccacctctactaaaaatacagaattagctgggtgtggtggcgcatacctgtaatcccaactactcgggagactgaggcaggagaattgcttaaacccaggaggcagaggttgcggtgagccaagattgcaccatgacactttagcctgggcaacaagagcaaaactctgtctcacaaaaaaaaaaaaaaagaaaagaaagaaagaaataataaagaacagagcacaaatcaaattgagacaaaataatacaaaagatcaacaaaacacgaagttggattttttaaaaggtaaacaaaaccaacaagccatcagctagagtaactaggaaaaaaagagggaagacgaaaataaataaaatcagaaatgaaaaagatgtcacaacggataccacagaaatacaaaagatcatgaaagaatatatgaactatatgccaataaatttgaagacctagaagaaactgataaattcctcgacatatagaatctgctaagattgaaacaggaagaaacagaaaacctgaacatatcaatgacatgcaacaagattgaatcagtaataaacctcccaacaaagaaagaacaggactagatggcttccctgctgatttctagtgaacatttaaagaattaacataaattcttctcaaaatgttcaagaaaaattgaagcagagggaacttgtcctatatccttctgtgaggccagcataatcctgataccaaaaatagacaaggacacaacacaaaagaaaaactacgggcaaataaccctgataaatatagacatagaaatctccaaaaaaatactaacaaaccaaatccagcaaaacaccaaaaagataatgtaccataatcaaatgggatttatcccaggaatgttaaggatggttcaacatatgtaaatcaataaacatgatacattatgtcaacagaatgaaggacgaaacctataagatcatctcaattgttgtagaaaatgggtctgataaaattcaacattctttcatgataaaatctctcaataaattagttatgaaagtaaagtaactcaaccccaaaaagaccacatagaaaaacccatagctaacatcatagtaaatggagtagtgtaggaagcttttcctctaagaagtggaacaagacaaatatatccactctcaccactcttattcaacatagtactgaaagttccagccagtgcaattacacaagaggaaaaacaaaaaccaaaacaacaaggatcatccggatttggaaggaggaagtcaaattgtctctgtttgcagataaacatgatcttacctatagaaaaacctaaagactaccaaaaaactcttagcattgataaacgaattcagcaaatttgcaggatacaaaatcaacatacaaaaatgagtagtgttgctatacgccaacaaaaaattagctaataaagaaatcaagaaagcatcccatttacaatacctataagcaatgaaatacttaggaacatgtttaatcaaagaggtgaacgagctctgcaaggaaagctacaaaacactgatggaagaaactgagcaggatacaaacaaatggagtagaattaatattgttaaaatgaccatgccattcaaagtaatctacagattcaatgtgatctctatgaaaatatcaatgacattcttcacagaaatagaaaaaagtcttaaaatttgtatggaactgcaaaagacctgaatatccaaagcaatcctgagcaaaaagaacaaagctggaggcatcacacgatcagacttcaaaatataccacaaagctgtggcaacccagacgcatgatactggcataaaaaccagtacacaggcaaatggaacataatagagaacccataaattaattcatgttatccactgccaactgatttttacaaaaatgccaagaacactcattagggaaaggacggtttcttcaatatggtgctgggaaaattacccatacgcaaaagaatgaaactacatctccacctttcaccctacatacaaatcagctcataatggatcaaatagctaaattaaagaacccaaactctaaaactactgtaagaaaacacaggggcaatgcttcaggtcatttgtctaggaaaagattttataaataagaccgcaaaagcacaggtaacaaaagcaaaaataaacaaatgacattctgtcaaactacaacacttctgcacagcgaaggaatcaatcaacggagtgaaaaggcaacctacaaaatgggagaaaatatttgcaaactattcatctgtcaggggattaatatccaaactatacaaggaactcaaacacctcaacagccaaaacccccctacaaacaatccagtaacagctgcatgtagagaggtgccctcctatctgatctatctcctagggagacactagttgtcaggttttgtggaacctcttggacaggaagagaggacttccttcagttggaggtggggaggagataagggtaagcatttcctcctactcctcctagaagccgaaggcatgcagaagggacagggcttgtgtccttcctgttcccctgctcagccagtcctccaggatatcaagtgtcctcagctccagctgtcctgtccccaccacaccctcaggaacccaggcatcctggcccagcactcataggagacattgagctggatggttctctctgcagtcacaccagctctgagaaacttcacctgacaggtcaggttggtgccatggtcctggagccttgaggtgattgtgaacgccaaggaatgggtggtcctggggctcagagaagtgggggcagctgacatccaggaaatgataagggggtgtctcctgcttataggcccagcgcacagatcaggtcaggtttcagaggtggctggactctagggtctccaggatgagaatgttgggtatatgagtcagggttagtgaggagatggggggcatgcaggatcaaaagggtaggtccaaggtgaagccctgggggaagctcaggctctggtctagctcctcccccaaacccccggcatgctttatgcccaactccctcccaggacagggaccccatcccagccctaccctgccctgcagcccctttgactttcccctgtggtcagtcctggagctggtttcttaccagtcacacacaaagagaactggggagattataacctgtatttggtacttcctctctccacctgaaagaaatgtgaaccattgttcacctccttctggcatctatgatactctgggagcagttgttcctctggggattcctgaagaggcagaaaaggcccagggtctcctccttcatttttcaatttgggttgtttgtgggctctgaagtgtcccagaattccttgcctccttcccggaaccagtagtcatgaacagagttattcgtgtagtagggtggagataggagaatgagcaaggcatgagggtgcacagacactcctgtacagtcacagactcctgcacttccagctagaaaactgcatcctgagccagggctccagtggagaaacgagggtcagctcagttcagccccagagtccctctccccatggcccactcacctatccactgcaggggcagcagcgtctcttaggcagagggttcctggactccctgtgtaatgagagaaggggaagggattggaggggaaggtttgagggcccattggaggctgaggagaagcaggaggacttggcggttcacagaagaaaaacctcagacctacacgtggtcagagctcatcccctctgcacagagcagagggagactccagagacctccccagaggggagcaaataaggagcagagatcttatatttcctctcatctgagagcttccctccaccaccagagcctggactaggatctctggggacatctgaggcatgggacactcatgagggtctaaggttctcccaccctgaggtgcttttttgtgcaccaccgtttatacctgggaacatgtcactcctggtctggtcccagagagtcacaacctcatctagagtcatgaggaagtcagtcctgcaggatggaggattctgtaggttctgtgggagtgtctgggacagtgaaaagaagaagggtcctgggtgcagtgtgggtggtagccattcactcattcatacattcattcattcaccaaacacacagtgagcatctgtgtgtcagtggggctggagaaaagatgccagggacctggtccccacccttgagatggcccccacccatagcctcatgtcctcaccatacacacacacacacacacacacacacacactggctttagagctgtggacactggtgaatttgccgtatgtcatggtagaattctaggtggttttttttgagactgagtctcgctctgtcgctcatgctggagtgcagtggtgcaatcttagctcactgcaacctctgcctcctgggttcaagtgattctcctgcctcagcctcctgagtagctcctgagtagctgggattacaggtgtctgccaccacacccagctaatttttgtatttttttttaagtagaaatggggtttcaccatgttggtcaggctcgtctcgaactcctgacctcatgatccacctgcctcggcctaccaaagtgctgggaccacaggcatgagccaccacgcccggccaatactaggtattttaaaaaaacttgagtactgaatttttttccctgacaactggtatgctgatttacaaaatttgaatgacatcttcagaataagaaccatgcaggatcttcttgtaaaccaaaaggaaggacacatattctatggactgcagtgcagaagaaacttcttttccatggatgttgccattctgtgtagtgtggacagaagtgatttatttgaggtcctcttcatagagattagcatttcctttcatgtaaaaatatgctgctcacagttaaatgaggctcataagacataatattttcagacaacatgagtatacagacaaaattaaaattttaggttccatttttcatgtttatggctatttgtatttttcttttcttttttctttacttttttttttttttttttttttgagatgaagttttgctcttgttgcccaggctggagtgcaatggcacgatctcggctcaccacaacctctgcatcccaggttcaagcaattctcctgcctcagcctcctgagtagctgggattacaagcatgcgccaccatgcctggctaattttgtatttttagtagagacagggtttctccatgttggtcaggctggtctcgaactcccgacctcaggtgatccgcccacctcgtcctcccaaagtgctaggactacaggtgtgagccaccgcgtccggtctctatttttctttcatgagttgcttgtttgggcattgacatgcatttataattgtcttgttggaatttagtttttctggtgtttcctaatcctcttcctccctcttgtctatgaagagtctcagacaatgtggtcatgctgttctcttatctgaggatttggaaatttgcctcgctaaatcatatgacacatatctgactatacccgggtgtgaccttcctgacagtcacacagttaaatgtcctggccaatacctttaagtttcaaaataaataaataaataaaaatcaaaataaaaaacttaatggataaaaagcaattttaggttcagctacgtgattttccatctcactctgtatcgtatgcatccaacgaactcttgaaatctaggacataatactatttggcaccatatattagtaaaatatttattacagtattatctagataaatgctcatttgtccttattaacatggagagctatttgtatcttcacttactatataaataattgaggttttaataagtaatataataccttgttgtaagttattttaaagttaagaatatggcttggattccttggattcattcactcggtgtaatgcatttgagactcagctatgtgattgggtatatatatgaataatttgtttttgtttttaaattgctgactcatacttcattgttttccacagatcccccattttgtatatattcactgtttgacagatactcagaatgtttccaggttttggtgaatataatataaagctagtacaaatattcccatgcagatttctgtgtgtggacactagtttttttttctcttgcataaatacctaggagttgggtgcttagtcacatgtgtaagttataagaaatcgcagctgggtgcggtggctcacgcctgtaatcccagaactttgggaggctgaggcgggtggatcatttgaggtcaggagttcaagaccagcctggccaacatggcgagaccccatctctactaaaaatacaaaaattagctaggtgtggtgggtgcctgctatcccagctactcaggagactgaggcaggtgaatcgcttgaaactgggagacggaggctgcagtgagccgagatcgtgccactgcacttcagcctgggcgacacagtgagactctgtctaaaaaaagaaaaagaaaaagaaattgtcaaagtgttctccaaagtgtgagtgccacttcatatccccaccagcaaaacatgtgagttctggttgctctacattctcattaatatttggtattatcaggaatgtgtaaaatttatttttcttttggtttggttttgtagccattctaataggtatgtactgccacctcattctagttctaatccacgatttcataagagcaaatggcgttgggaatgtttccattcatgtgattatttgccatgagtttttcttctttgatgaggaggctgatcaaatctttagtgctttttaaaatccgtcttaaaatacacataacaaaaattaccattttaatcatttttcagtgcacaggtaagtggcattaagtactttcacactcttatgcaattatcaaccattgatctccagaaatgtcttcatcttgccaaattgaaactctgtacccactgaaagataactccctattccgtcctgctcccagcccacggcagccaactttctactttctgtctatgaatttgcctattctagatacctcctataagtggaatcatacagtattggtaacttttgtgactggctaatttcatgtggcatagtgtctccaagcttcatctaagttgcaacacgtgtcagaatctccttctttttaaggtatttcattgtatgtatataatatagaggcttttgaccagtgtagctcatcctgaattatcgagttgatccttaaatccaatcagaagtgtcttgctgggagaggaacagatggagatttgatgtacacagaaggcggcggtgtctgggcaaacccatcacctcaaatgcatctcaccaccagggggagccatagagttgtgcgatgcatccaccctaatctttgtacaacctcctgtggataggagtaagaagtggatagagagggtgagaggcaggagcctccagtcagcttccaaagatgggagtgagatggaaaataacaagaatgacattaacaataacaataacattacaaataacattaagttataacagctacctcttgtggcaaaaaccagagtagggggctgtgagaaacccaccttatgtacagcgcctcagagatcccaacttaacattttttgtgatctccaagatagatagacaggaaggagtggctgttcattagcattcgctctggctgtgccaggcagaactttgccctgggagggactatgacgttctgctctcttaataaaaaggtacaaagctgggctccagaaatagactgaggggcctcttgggtctgctccccaggctgcttcctgtccataggtgagcagtggatgctgccactcctgactggagagacagggtttcagaagaaattctccaagttatgggggatcccggatgggatgggtcaggtctagctctggggtctgcttaagggaatgagagtgagtctttgaagctcaaggcaccctccaaacctgcactcctctcctaacagcagggtcctcatgagggtgtcgttgcatgagacagtaagggtcatgccatgggctctgaatgaaaccagttctgccatcttcatcctgattgttcagactaggcatcactgaccatgcacagtctagatggagggaggtacatgtttcttcagggacatggcacaatgctgtgtctaaaaggaatgcttcatgttggtgcagccaaatggagctgatcggacgctctctgtggctgtggttgctggtctcctctcagtatccactctctctttttccttagtaataaggacctcagacatgagaacccagctaagaaggattctacgttctacactttcttctgtagttttttctgaacagccctatgaagaggaaacattttacatccctattaaaaacaatttctttttctttttaatttttgtgggtacatagtagttgtagaccctaagattcttttaaatttatttaaattttttatttcttaacctttattttaggttcggggtacacgtgcagatttgttatataggtaaacttgtgtcatggaagttttttgtacagattatttcattacccaggtactatgcctagtacccaatagctattttttctgctcctctccctcctcttactgtccaccctcaaggaggccccagtgtctgatgttcccctctatgtgtccaagtgttctcctcttttaactgccacttataagtgagaacatgcggcattggttttctgtttctgtgttaattttctaaggtaatgtccccattttacaggtgtagaaagcaaagcttagcggagataggaaacttaactgagatcacgtggcaggtaagtggcagcattaggttcaaaccagacagtgtgaccaggaatcccccctcttaaccatggtctttcctcaaacagcctgtacagcctttgacccagcagtcctcagtaatttgggggcagtgcacaagaccatcctcacttctaactccagcttcacactcaggggtcccctgatcaccttcagtttcgacagttcacaagtaggactcacagaactcactgaaagctcttattctcatgttatgtctcattacagcaaaaggatacagattaaagtcagccaaggggagaagagcatggggcagggtccagtgaattccaaatgtgtagtttccagttgtcccctcccagtacaatcacagacagcagtaattcctccttacatgacgtgtgacaacatgcatagagtgtcaccaaccagggacactcacctaagccttgatgcccagggtttttattgtggctttgccatgtagatatggatggctgttcacatggctgatcttagcttcagctgctctagagatagagctgacaacagtgacccaaagtccctaccattagtcatattattagactatttggtggtcatattattagacgaatataactatttagtcatattattatgaatattagtcatattattgggcaaggcactaaggtaaataaagacattcctatcaggtgagatattccaggggcttagagttccctcccagtagctgagagcaaagtccagacctctatttaagtagggttgagttctttcctgtgcaagttcacctctgggattaatcacggatctacaaatgggactaggcaaaagctgttcatgctgctgtgtacaaaaaaaagtgggccaggcatggtggctcacgcctgtaatcccagcactttgggaggccaaggtgggtggatcacgaggtcagagattgagaccattctgaacaacatggggaaaccccatctctactaaaacacaaagaattagccaggcgtggtggtgtgtgcctgtagtcccagctacttgggagggtgagacaggggaatcgcttgaacctgggaggtggaggttgagtgagccgagattgtgccactgcactccagcctggcgacagaggaagactctatctcaaaaaaaaaaaaaaaaaaaaaaagaactctaatataaactgtgggctttgggtgctaatattgcgtcaacgtgagctcatcaaatgcaatgaatgtaccactgtggtggggctgttgataatgggggtggctgtgcatgcgggagggcaggtgatatatgaaaaacctctgtaccttcctctgaattttgctgtaaacctaaaactgctctaaaatatcgtgttttttaattgaaagaacccggcctggcccagtggctcatgcctgtaatcccaacacttgggatgccaagggggatggatcacttgaacccaggagttgaagaccagcctggccaacatggcaaaatcccgtctctactaaaaatacaaaaaatattagcccgatgtgatggcacatgcctgtaatcccagctactctggaggctgaggcatgagaatcacttgaactcaggaggcagaggttgcagtgagcctggatcacactactgacctccagcctggaggacagagtgagactctgtctggaaaaaaaaaaacaaaacttaaaggacataaatgattgcaaatagaggattggttgaataactcaacccatatccaatccagtggaatactacacagccatgaataatgaacagtgatggtgcaaagccatgcttctcccatgagagtccaggacctgaggcagaatgtggggagtgcttcaagggagctaaagccagaagatccactttgtatatatttcagaggcaccatttacacggtaatactggggcaggccaattaactaacatcagtggtaacgaatgcgttattttcctattaaaactaacatggaggtgtctggctgtaggctgcaaatattcatatgggttttcagggcacagaagacttcaaagatattttctaaaccagtagacatccagaggtgcatattcaccttactctgacaaaacttgggtttaacatttgaaaagccctaataaaaacaaaaatttaatgatataattctgctctaataaaagagattcatatgtgcatgcgtatgccagctataacatacccaaactgaaaagacacatagaaaacagctggttgtatctctgggtggttttaaaaaacggtattctttaaatgacaataaataattttatatttattttacatacttatatagttatacatataaaatatatgtataaatatgtaaatgttaataatattacataaatatgtaagtatgtaaatcaaaaatttttataataaattcaaattcactccttttataatttaaaaagtagggtgtgttatcaaaatgaaagacaaacacattcccaagtacggttagaaagaccttgtcaattggacatttctgagttgttctttccctctctctctctctctctctctgtttctgtgtcttccctctgtatctcactctgcctgcatttttttttatgtccctgtctgtctgtctctctgtcaggtttcaaggggcccatacctcattacttctgtgcacaactcccctgtcctggatccctgtttttagaaacagcctgaccctccaacaacaaagtgtcaacctaaataacaaacagagagaagctctctaaaagaaaatgatatgtattcaggaatggggcattgcaatgggaatctgggtgctatagtaaactacgtgcatattcagggaggtaaaagaacacaaagggttttcaatggaaaaatgaggaggaccccataaatggtttgagataattaccctaggctacaaggatccctaatgagggtgacgtcagtccaagtttggaccggaggttgctgtccaaatacttgtcacagaagtatttttttggtggaaggaagcaatggcttttgtgcaagactatggtttctgcagcgtcttctgtgaaaatttttgttgtcagagagccctcgcttcacagccttccccactgtatttctcagggatttttttggcttgtgagcactttcacaaagggatctggttatacacacactggttcaggtctagaagagcattccctgcagccattcacaatggtcatgggaggaatatttagtgacatagagaaatagtccactgttgaggaggaaagcagccagttgtaaaacagccccaggcagtctaaaagttgggccctacaccgggcacggtggctcacacctgtaatctcagcactttgggaggccgaggtgggcggataacgaggtcaagagatcaagaccatcctggccagcatgatgtaaccccgtctctactaaaaacacaaaaattagctgggtgtggtggcacgagcctgtagtcccagctactcgggaggctgaggcaggtgaatcacttggacccggaagacgaggttgcggtgagccaagatcatgccattgcactccagcctggtgacagagcgagactccgtgaaaaaaaaaaaaaaaaaaaaaaagctgggccctgcataggaaaaccaaaccaaatggaaacaggacatacagttgaggagtttgatgtcctatctttgaggcacttggctgtattttctggttttctttgttttcccaacagtgagcctgtgtttttccgttttttcatgaccagagaaaaaaatgtaaattattataaaaataagtaaataaataatgaactaaaggcaacataaagccataaagataaggttgggctctcaagagccgtcttccccaggccccacccctgctggtcagagtgcaccctggggaggaaaggccgccctgaaggctgggagacgagaccggcagcctctgtgccaggagacacaggtcttggagggagcagaggaggtggctgtgtctctggagggacccctcctcctggaggaccccaggcagctcatggacctttccagacccagatggagcctgtggaggagggtcttcctcatgggtaagagatgctggatgctggatgagcttcccaggactgagggaagggcagctaggagcaaagcggcggggagggggctgggaccatccccatccacgggcacatcaagaaactcccagagcaggggtcggggagaggagaagggggaggaccctcagcacaactttcatgagctcacacacgtgggcacactttgcccctagacacacccctgcacagacccacacatgtggtgttacacacacacgcacacgcacatgcacacacacacacgcgcgcacacacagagagagagagagagaaactgtgtttctatctacgcccaggaatcaggagcttggaccttcaccctcacctccctgcactcacctcccactgggtgccccaatctgccccatcccctcccccacctctcaggccagattccttcccagcccctcacctttgcccaggaccttctgtgccccctacaagcacaactgtcctgctttaccacgtgtactgtccttgaacaggtccagtgtgtccatacgtgaggcctagagccggggtctcaggcatctctgcctcctccacatagcccaggcttggggttcacagggcagtggacaactgcccatgtcatatgtggtaacaggctgccgcctccattcacacccactccagtgaatttagatgcaaaatcaaagacatgtagaaattctcgggggagtatttctcacccagacaatcattactgaactccccctgtgtccagcctgtgctcaggggcgctggggactcagtggtgactgagacagggcagtcctgccctcctggagcccacagtccagggcgagatatagatatgtgcccagactctgaggacccccagaggtcatggctgggatggggggagcccaggaggagctgggggagcccagaggggacacctgacccaggctggggtggaggagacatccaagctgagacctgagtgatgaatagaagtgagtcagcaaggagggtgcagatggagaggagggagaaggagtccctgccgggaatggggaacagcgtgtgcgaagcctggagttaggagaaggtgtggtgcaccaagagagctatgtagaggcctggggcatacagcgtggcagtcatgtcttctgataaataactacaggaataaatgagtaaaaggtgcatagtggggacaggatggggtaggtgtgcaccacaaggaggctcgatgagtcacaaacaccagctctggctgagagtgtttcatatacccacctaagagtttggactgtatcctaagagcactggggagccatggaaggtgtttgagcagaggagaacagggtcgcaacttgggcttattaacatttacgtaactgtgatgtgaggatggattggaggctgtgtggctagcgaggagggcctgggagaagataagggtaaaatggaccacggcaggggctgaggggaggcacaggaggggacaagctggggactctaccaggagccagaaactcttgcctggttcaccagcgtctctgggaatcgttcccggatggtgtcttttttccttgtcttctcagccagtctgaatctctttgtgaatttctctctgtcttttttccttgtcttcttcagccagtctgctggcctgtgggatctgccaggcctctggccaaatcttcatcacccaaaccctggggatcaagggatatcggactgtcgtggccctggataaggtccctgaggatgttcaggaatacagctggtactggggtgcaaacgacagcgcaggaaacatgattatcagccacaaaccgcccagtgcccagcagcctgggcccatgtacactggcagggagagagtgaacagagaaggcagcctgttgatcaggccgactgcattaaatgacacgggaaactacactgttcgggtggttgcaggcaatgagacccaaagagcaaccggctggctggaggttctaggtgggttagcaggtgctgtgtttcccaacccccaaggagagctagatgtgacacatttgagagaaggacattatacagagcatgacaccgggagtggaaatcacggagccgccctggaatcttgtgtaccatggacagctcctgggggatctgagggctagtgggaggagagggcggagttggaagacaagcagtcctgtatttgacagtggctgcaaatacatactgcaggaccctggcccatttgtgttccttctgtgttcttcagtttcctcatctgtagagtggggaggaacccaccattgtggtttgtcgtagcgttggagggagtattcgtaaagtgaatgggactcaaataatggagtagtattgtgtagccaaatgccacctctcactcagaacctctcgtgtctcctggatgagggtcctggtttggaggatcagaaacaatgattaggccacatgtttatgccaagagctcaccattatggcagcagacagcacggcagtggctcaggcaaggcccacacctcagcagcctcattgccctgtgcctattcctctgcccttctcagctcccttgccaggatgccagatcttatcttacagctcttggcttctctccaacatgcccagaagtcccctggagaggagcagagcttggggaagcagaccccacttgtaatttttttctctttcctgcttcacccagagttgggaagcaatctgggcatctccgtcaatgccagctccctggtggagaacatggattctgtggctgctgactgcctcacaaatgtcaccaacatcacgtggtatgtgaatgatgtgcctacctctagtagtgaccggatgacaatttccccagacggcaagaccctcgtcatcctcagggtcagccgctatgacagaacaattcagtgcatgatagagagtttcccagagatctttcagagaagtgaacgcatctctctgactgtggcctgtgagtggtctgggctcctgggactgaagccagggctggtctcagggctttctagggataggaatatgttaggacaggctgagctggagagagggggcatcctgggccagcctgcagccagctcactctggattggaatcagctcaggctcttgagccctgtgaacttgggagctgcccctgctactcagaaacgtggtacactcgagtttgaaatgaagacgccagtccccacttctcagattagaaatggtcagtgtgcctttgttgaggtctgcttttgtgtaaagaggggactactgaataccattgtttcttaaattgatgttcaattattaagttttcaagccccttgagccttgaaattctgctcattaatttctttcttcttttctactaaatttagtatagtccctgtcactctctttcactgaaactgaacaggctatgctcccttaaacagagagctttatttaaagactcaattatgcattccatacattcttttttttttatagccttttagctgcctaccggggcaagttcaccacccaggaagacctccacaaattctcagacagctcttggaaatcgaatacgctgaacttataaatacattaacacttagatttttccccagtattccaggactgctcacagagtttaataaactcttccacatcttccaactgaaaaccataatcacacatctaaaatcactttcacgtctcctggaactactccagcggtctgtcagatttcctaaagcgcaggctacggcacccatcctgtggaaggtggggttgaggggtgaacaatttctgacctccatacagctgtttacaggtcagaggcttggaaccaagacccaggatccagaggctgcagctgctcagggcagttgctcccaggccctgagactggctcaatccttctgtgtcagttggagtcataaagtcctaatcctctcctccgagcctcattgttttccatctataaaatggatcaatggtggaaccagtcacatgggttgttctgggaattcaacaaatgtggggacaggcacagagcttagaacagtgcctggcacacagtaggccccatgtgttggcttttactccactaattttattacaatgtaaatggcaccatgggcctggcctctagtagttccttaatcatagaagatgctcttatggttattgttgttgacacagctgccttgcctggggcaggtctaggggttagcccgaggtgcacaatggggaacctcctggctgggggaggacttcatgagacgggacgccgaggggtcagaaacatagcctgggcctcctaccctgtctctacagatgggcccgactatgtgctgctgaggagcaatcctgatgatttcaacggcattgtgacagctgagatcggctcccaagtggaaatggagtgtatctgctattccttcctggatctcaagtaccactggatccacaatggctccctcctgaacttctcagatgcaaagatgaacctctcgagtcttgcctgggagcagatgggccgttaccgatgcactgtggagaaccccgtgacacagctgatcatgtacatggacgtcaggatccaggccccccatgagtgcagcagctcccctccaggctcatgctttgcacatctccctgcctccatgccctgctaggcagtgcccaccctcaggagtgccacctccactgtgccatgacatgctctcaacctctgggtgaaatctcccagttctctgaggtctgggtccaaagctgcctcctctgtgaatcctctggagtcctcagatcagagtcagggtgactcccagggggataagagtagcagacattggctgagcacttactatgtgcccgcctttgttctaacctgtgtgactctcaccatttctctggagtaagtgaatgcgattggcatcacctccatttgacaggtgagaaactgagccccatggagtttgagtgcttattcaaggctctattgctttgtaacccatggaagaggtggcattcaagcccaggcaggcatagcctacaccctcaactgctcccttcagctgcttcaagatgaggaattagaaagacgcagggacgggatgggtggacggggagtagagatttggcatggccatggcgtcagaaacttggcttgggagtgaatttgtaaatggggaaagcatcttcttagcaaccatgcgtccaatcttctgcatcaaggagagagactgatgtgctcagggagactgcagaggagtgcagcaggtaaatgcaggggctctacagcccaaggttcttggtccaaatccccattctgctgctgcctatctccatgaacctgggacaagcagctccatcgttccgagactcagtttcctcaactgtaatgaaaggataagaatccctgcagggaaagggtgctgtgagaataaaatgaaactgtgcaagaaagtacagaagacattacaggatgtggtctccagactttacttcagccacactacctcctaagcacctactatgcaccagacacgatgtgtgcatgcagccctccaagtcatcgattcacatttttctcttcccctggactacaagattcaggagggcagaagctggggaagctttttttttttttttaacagagtctcgctctgttgcccaggctggatgcagtggtgcaatctctgctcactgcaacctgcacctcccggactcaagtgattctcctgcctcagcctcttgagtagctgggattacaggcacacgccactgtgcccagctaatttttgtatttttacaaaatagagtagagatggggtttcaccatgttgcccaggctggtcttgaactcttgacctcaggtgatccaccttgggcgagctttctgttttccatttgtcctcagtgcttggcacagtgtgtagcacatagttggtgctcagtgaacatttatgcaatgagttaatgaccctgtgtcacacaccccccttccagtcactgtctctccccttatgagggtttattcttctctattcacttatggttgcttgcagtgtgagacatctctttgcttaattgtccactgtccacttcccagctagaatgtcaggcccatgggtacagggagtttgttttgttggctgctgaatccctcgtacctggaacagtgctttgctgataatagatgttgacaaatctttgaagaatggatatgtgggtgggtgaagagatgagtgaatgcatgaatgggtcaatcgtggtcctgacccccaggtgtcctcttccttcagggatcttacctgttgtccacagagatttctccatctcaggatccatggtgatgttcctcatcatgctgacagtgctgggtggcgtttacatctgtggagtcctgatccatgctctgatcaaccactactcaatcaggtgccctcattgctctgggacaagggtgggatgttggctgggggctgggactcaggagccagccctccctccagaggggaagcagagccagaaggggagggataagccaggaactaggttgtcagggatcatctggggcagacagatcagcccccaggacctgaagctgatgggagcaagagagggtttagagtcggccatggttctaaatagctgtggggtttcttctagcaacttcccttctctttgtgtttataagggatattaaggtttacctagagggacaggtaaaaaaatgagaggtctgcatgtcaattcctggtacatagtcatcctttgctaccaagtgaagttggggaaacaggtatcagcggtgaactatgcagggagaagagattgggcagtgggatggttaaggtctgggttcaaaccccagctctgctacctgtaggctaggttaccttgggtaggtcacttctcctcatagctcatcctcagcccagctgaagaatgaacggagcaacaactgcctgaagggtgatgtggggattagagacacgtcttggaggaaaaggggacttgcagcattctcagcatagagtagaccagagtttctcaacctcagcactatcagcattgggaccataattctctgatggggaagaggaggtagtaaggctgtcctgtgcattgtgggacatttagccgcataactggcctttttccattagatgctagtggtaacaaccaccaccaccccagttcagaaaaccaaaaatgtctctagacactatgaagatcacatgggaggcaactttgccctggttgagagtcagtggagtagatgttagaaagtgcagtgatgcttgggaggatgatgacgttaatgatggagataatggtaccaatggtgatggtggtgattatagtgggaatggcaatgatgatgtagattaatagtggaaatggcattattgtgatggtgatgatggtgatgatagtaatagtggtggtggtgatagtggtgatgatgatgatgacaaagatgatggtagtgttgctagtgatggtgacattggtagtgatgatgacaatggtgatgatgatggccataatggtgacaatagtattatggtgatgatgttggtgatggtggtgctaatgatgacggtagcaaatgcagtgctgatggtgatgattatgatgaagcacaatgcctatatttttctgtgagctctggggtgacaggcaggcctctgagccttaaaaacaatcctagaccaagggtgcagctgggtcagcaggttgcatcattgtgcccggaggaagctgtttcttaggggattttccaaggtcagggaccgcatctccttcctactaagactgtagtaggagcagccgatggaactacttgagccccctggtctaggaaggagagccctcatctctaggggccagtctccttcacctgagatcaacatgcctagtgacagctcagtcctcaaggactctcacatatgcctaggtgtcctgcagaacaaaacttttgtttattgagctaattttcttttttctttttctttctttctttcttttctttctttttttttttttatatggagtctctctctgttgcccaggctggagtgcagtggcgcgatctcagctcactgcaagctccgcctcccaggttcatgccattctcctgcctcagcctcccaagtagccaggactacaggcgcccgccaccacacctggctaatttttttgtttttttttttagtagagacggggtttcaccgtgttagccaggatggtcttgatctcctgacctcgtgatccgcccgcctcagcatcccaaagtgctggggttacaggcataagccaccgcgcctggccttattgagctaattttcatctaaaattttaaactaaatgaaaatgtaattgaaatataaactgtgagatcaaaattatattgaaagttcatctaattgaaagattaaacattaagtaagatttagtacctgtttcatttaatattaaattgaatttaaactgtgaagaaatggccaggcatggtagctcatgcctgtaatcccaacattttgggaggctgaggcaagcagattacttgagcccaggagttcaagaccagcctgggcaacgtggtgaaacctcatctctacaaaaaatacaaaagttagcctggagtggtggagtgcttctggagttccagctactcaggaggctgaggtgggaggatctcttgagcccgagaggcagaggctcagtgagccgagatcgtgccactgcactccagcctgggcaacagacaccctgtataaaaaataaataaataggccaggcacagtggctgaagcctgtaatcccagcatgttggaaggccaaggcgggcggatcatcaggtcgggagttcgagaccagcctggccaacatagtgaaatcccgtctctactaaaaatacaaaaaattagccaagtgtgatggcagtcacctgtaatcccagttacttgggaggctgaggcaggagaatcacttgaacctgggagattcaagtgcagttcaagtgcaggttgcagtgagtcgagatcacaccatggcactccagcctgggcgacagtgcgagactccatctcaaaaataaataagtaaataatctgtgaagaaaaggcctgtaacatgaattaaccaatatggtagccactagtcatacgtgactaagtttaaaatgaattaaaattaaataagtaaaaaatccagctcctcagtcacaccagctcatggctatgagattggacggtgccaatatagaccatttcgtcattgccaaaagttctaccggacagcactgctgtaaaccaattatgtagaatgttcttaaagagtaaaaacaaaaccaaacaaaaccagaaaaagtagaaagagacaaccactagtccctcctctgtccctcaccccaaccccaggaactatgctgcatgggaagagaagagagctcgaggtggaaacagaattctcatattcagggaagagcagagaaaaggggattgcaaaagcagatggagagagtggccatgacatagtggggaggggctcaggtcaagggcagaaacagaatgatatgatggtattaataacaatctctgagattttatgatgtgcttactgtgtaccaacccttgttccaaggtatttactagtaagagcttactttatccccataggagatatccctgtgaggttgggaccagtattagttccattttacacatagcaagtaaagcacagacaggctgactccctgctatctcactgtatggtcaatgttgtaggctcctttgctaagggaccatgtaataatcataaataggttcaatatctaaatacaagacctcgcctgggaggtcagcgaggtcttggaaatgcagggttgttggctagtcttcaagagaggtctcaagacaaaaggtctcagagaattcagctgagaaggggtgggcccctgccttagggtgggctcctccctgggggcaggcccctcctggacctggaaccacattcttcacaagggctgcagaaggtgccagagtttggagtggggcagggaactcatgtggacagggctccagaatccctcctcattcccctaagagcagggccatttctgttttacggaatggattccatccaggggtgcatttttgcttttgtgggccctcctctagaaaaatattaaaaattatattttacgactatcttgatataaacatgtataaaatatagggtgggttgtattcagtttttttccttctgattttagaagaaattgaaacatttttgtgatccctaaaagtataatgggccttagtgcttctgtccataatgatcctgcttccactcgaatttcttcagacgaaaagtttccaggggtttctatccttgtgttcaaagtcattgatggagactgaatgagggacaaatgaatgagtcactgaggttgacttaatgtcaacctcatcatccaaagtgaaattttggatgattaggttgacattaagtcaacctcagtgactcattcatttgtctctcattcagtttctcggtccccccacatttcaccaagctcctggctttattcttgggcctctgatgaacaaaagatgaacaaactgctttccctgcccccagtaatatcacagctaccacgatccagccccctctttcagctccccttctccctccccaaaagatcaccctggagttactcatattttaatcatgattggatctggataccacccaaaaggcacaggagtggcatttcctagaataaatggtggggcaagagggagctgaggagacacacagcatacgtgtatgcgttttcactatgttatctaaagattttagaagatacatcttcaattatcttaatatttagatattgagcctatttatgattattatatggtcccttcaccaaggagcctacaatgtcgaccatacagtgagatagcaggcaatcggcctgactgtgctttacttgccatgtgtaaaatggaactaacactggtccaaacctcacagggatatctcctatggggataaagtaagctcttagtagtaattaccttggaagaagggttggtacacagtaagcacttcataaaatctcagatattattattaatgccatcatattattcaatgtgcaattctaaactgattgtgataaactcaagaaagttcaagggtatttcaaagagtgtatctgaatcacctcatcttccaccacctggaagaacccccctggcctggcagaaccacctccacgccactgtcccattcctttcaaaggcgccatgttctctatggtctggggcctcccctccgatatgagagcagggatctggaatcagagaagccagtttgggaatattggcctctgttatgttctggctgtgtgacctggggcaagtaacatcacctctctggaccctcatttcttcatctgcaaatgggttaaagtatctgtcttgcttggctgttgggagggttaaagataaccctgtcataagttatagtgcctggcatataattggtatgaagtaaattactgttattacctccatcattgttgtgatccctcataattaggccaacagtgcccactccttcctcagcttcacccggcctctttctccccacacagtggcatcttcctccagtgccctcggaaatctttaaaagtatggagatgttgaggactctcggtgcagaggtgcagccctcagaccatctcctccattgggtcccatgtgaggaagacttaggcttggacttggtgggaagtcgggccccttcacctctctctatccaggactctcccatgtttcttagggacctgagatgtggcttcttccctgatttctccccataggacaaatcgggctccatgagtgtccaccccagacctgaggacaagaccagaagggcaagcaggtgaggagagggtgatggagaagggctgggggtccccatagggccagcgaggctgaaaagggtccagggtctctttggagggtactggcaagagagggacccagcccagtcacacggaagcctggagatggaggctccagtaggaggtctgcagaccccacccgggacctgaagatgatgtcgtgggtagcgtggccattgggcgcttcatctgccaatcagagctggtcaatgggttgcaggtcggggcgggccatgcgcaaagctgggctctaattccaagcgcctcctccctcagctccggcgcttccagcttctcagatttcttcacccatggaatcaacagcgatgctgtaaacttatggccaaggggtgccaatcagtggttgttccactcagtgccgaatgagagaagagaccttagaatcaggcagggattaaatttcagtcctgccctgagtaccggagcgacctgaacgcagccccagtgaggctccctcacctggatgcaccgtggaaccatcgtcagcatgattagcacatccgtcagctcaaatatttaatttttttttttttttggtgacaacatttaaactcctctcttttagccattttgaaatattcaatacattattctgttatttggaacaacacggatgaacctagagaacattatgttgagtgaaataagccaggtacagagagacaaacactctacgatctcactatatttggaacctaaaatagtcgacctcagagaagtagagaagagaatggtgggtaccagaggccgggggcggggagtgtggaccgattggatggagaaagggagagtttggtcatcaggcacgcattttcagtttgacaagaggaataagttctgatgtcctgttgcacagcatggagggctgttaattctaaaggaatcagtctcgggcttctttgctgcaggggtcgtgagccctcaaacaggcctgagtctctgcagtttctcacttggggatgttgatctcggagtactcatagccgatggcctcctgttcctgtgggtactgaggcctcgctttgtggaagctgagggatgcatactggatctctccttcctctggggagggggtggccagggctggcggagcatggtgtggggggctgtcatctgccggggattcaatcaggggtccctgaatggaggaagagaagggagtcagtgcagagcagtggggccagcatgcaccagagagcatccaggaaggaggcccaggagttccttcctccattcatcccatgtgcactttgctgaaatctctttaatacgttcctctaatgtctaatactcaattatcaccttatgtggtgtttactaatctcattaacttccaacaacaattccatagtaagatattattattgtctccattttataaatttgaaaactgaggtagaaatggttaagtaccctgcgcaaactccctcttataccgggacccaatccagtcagttccttctgaccccaaagcctggagtcctgctgaggcctcctgtgtgtgagttcctgggctgggtgctggatggactgtggtggacacggtaggcatgggctctgaccccctgcatctcactctttaactgaaggaggtggcaataaatgactgccaaacaaatgaatatctatgtgtgaattatgataagatgggtaggaagagggcaagtgagagagaattacagggccttgattcagacgtggcacctgcccttgagaagctcacagtttggtggtgtggggaagacaagtcaataaaataaattatatccctcttataggaagaataatgacccctccaaaatgtccatgccctaatcccctggaacctgttgatctgttaccttacatggctaaaggggctttacagatggaattaggttaaggatatcgagatggggaaattatcctggattacttgggtgggcccagtggaatcacaggggtccttacaagtagtgaaaggaggagggcatagatagattggaagatgccaggctgcttgacttgcagacagagggagggtcctgagccaaggaatgcaggtgcctctagaagctggaaaaggtgagaaagcgcatcctcccctggatcttccagaaggaactggccctgcctgccaatgccttgattttagcccagtgacacccattttgggcttgtgaccttcagaactttaagttaatccatgtttgttgtttgaagccaggaaatgtgtggcaatttgtcacagcagccacaggaaactaatatagactcacacggtggagagtgacagaggctgcctgggaggcttctccttcatctctgaacttccctgctactcccctgcacagcagatgctccatggaactgtttgtgatttcactcccccattctgtcttgattactcaaattaacattcacacacacaccacatctcagcactgctgttatcaaggtcaccatgaccactgcttggctgagtccaaatgtccgtcttgcagtcttctccttcttggacttcacagcagcagaggacccagctgctcaccttccctacacagaagcccttcttgacttaactacaggacatcgtgctttctggctccatcttaccttcttggcagcccttttgctagatgctccacatctccctgaccctaaatatcagagcagccctgagctcttctttacttttgctttgcaatctcatccactgtgttgtcttcatgccatcaataaactgacgacttccaaatttacacccagccctctcccctctgctgactatagtccttgatccaatagtatacttcaaacccacacatcttgtcgaaaggcacacaaaatgcaacctattctatctgaactcctccttttttcccccagatctctttttttgcacaatcttttctgcctcaatgactgacccctccattctacccatggattggggcaaaaatctggaagtcttcttgctccctctctgtcattcacattgtacacccaatctattggcaattctcataagtctaacttcagaatttacccataagacagccatgtccaccaccactgccatcttggttccagccagcaccacttcctgcctgagatgttcaccagcctcctctctatcttctctgctctgtctttcctctaccacacacagtctcttctgcacacaacagccagagggatcccatgaaaataaaagttaatcatggtctcttgcacaaaactctccaaatgctcacagtgccctgtgcagccagacacgattcacacacaggctcaacttctccaaagtcatttcctgttcttggccttgcttccctctgtctaatcacacagacgtccttgtggatcctctcactggtccctcctgtgcctgagcctcaccctgttcttccctctgtctggagtgctcttcaatctcacagtcagtgtcagatctgagcctccttcattcctgtgctcaaacatcactaacagaaacacaagtcatcctacagaatggtagaaaatattttcaagccatacatctgaaaaaagttttaatatccagaatatattaaaaaaattcttagaactcaacagcagagaaacaacacagtttcaaaaataggcttaaactctgatagactttctctaaaggtgatatacaaatcaaaagaagcatatgaaaacatcactaattattagaaaatgcaaatcaaagccttaatgagatatcacctcacacgcgttaggatggccactgtcaaaaacaaacgaaaaccaaaaagtaacaagcgttggtgaggatgtggagaaatgggaacccttgtgtgacatttgtgggaatgtaaaatagtgtagccactgtggaaaacagtatggcagttccttaagatattaaaaaacagaataatcttagagtccagaaaccctacttgtggatatacacccaaaagaattaaaagcaggatattgaaaagatatttgcatgcccatgctcacggcagcattattcacaataaccaagaggtggaagcaacccaagtgtacatcaacagataaatggataaagaaaatgcggtaaacatacacacaatgcaatattaattaccctttaaaaagaaggaaatcttgtcacaccttacaatgtgggtgaaccttgaggatatttgttaagtaaatcgtccagtcacaagatgagcaatactgtatgatttcacttatatgaggtatctagaatagtcaaattcataggaaaataaagtaaaattggtgatttccagtggctgcaggaggatgaagaggatgggagggaaagggcggagttattgttcaacgaatgtggagtttcagttttgcaagataaaagggttctagagatctagcacaaccataaacttaataaagttgaggtggtaaattttatgttatgtgttattttccaccgtagatggctggatggatggatgggtggatggatggatggacgggtgggtgggtggatggatggatggatggatggatggatggacggacgggtgggtgggtggatggatggatggatggatggatggatggacgggtgggtgggtggatggatggatggatggatggatggatggatggacggacggacgggtgggtggatggatggatggatggatggatggatggatggatggacagacgggtgggtggatggatggatggatggatggatggatggatgggtgggtgggtgggtggatggatggatggatggatggatggatggactgacgggtgggtgggtggttggatggatggacggacggacagacggacagatggatggatggatgaatggttggatgaataaacaaaaataaacccacaagccttctccttggaacttcctatttcttctacattgcattttccctaaagcatatatctatctttatattttattcatttgttgttttattagttttgattagttgattggtttggccatatccctctgtatagaattaaacttcgatgagcccaagacttttaaatgttttccacagatgggtcgctggcatcttctcttaggagatgctctataacttttcctgaatgaattaatgaatgaagggatggatgttactctgctactcgaaaccttccacaggcttccagtcacattcaatacaatcaataaatgatgagtgtaatatttatatcagggcatgaaggatgaataggaatcagggagtggggagaaaaaagcatctgaggaggaggaacagccaatgtgaagacgtagagacacaaataaccttgttggtgatgacactggagtccagcgttgatggagcatggagcagaggcaggagtggctggaggcggggctgggattggagcaaagccagggaagcccttacccagagcacaaaattaaaagggtgccccaaatctcagcaatgaagatgaatacaattttaacacaatatttaaaaaatcaaaattaatataaaaagtccatggaaagcctgggcgcggtggctcacgcctataatcccagcactttgggaagctgaggcaggcgatcacctgaggttgggagtttgagaccagcctgaccaacatggagaaactccgtctctactaaaaatacaaaattagccgggcatggtggctcgtgtatgtaatcccagctactcgagagactgaggcagaattacttgaacccgggaggtggaggttgtggtgagctgagatcgcaccatcgcacttcagcctgggcaacaagatcaaaactctgtctcaaaataaataaataaataaaaataaaaacaaaaaattcctggagaacaaagatttaaataaacccagattagtgacagtgctctgctgagccaaatggaacttgaagcaaaagctattcaacgtgcagaggaagcagacagtgatggctgtggaacgtccctccaggccgggaaggggaggcaagaggcagggaggtgaggaggtcccagacagagatccagaggcttcagcagtgagaggggtcaggatgggatggggagggcaatgaaagctgttcttaggaggaaaaagtggacaggacgtgatttttcggctgtaggggaagaaaggaaggacagtgaggaagtaatccccttccatgcctggcctgggagaaagcaggggagaagggctgtgattcaatgctcactcacctgagaggctgagcccctgacagcgtttgcgtcctccatgcctgtatcccccacgcccactgctggccttgccgatttcttcctgcaggacctcactctgagtgaagagaccagagagcctttcagtgtggtcagatcggggtgcagtgggcagaccaacccctgccctgtatttcctattggggagctggaggggtaactgaggcgggaggggagtggtcccattccagagaccccaatgtcgaaaacagaggctcttttttcctgggcagtagggtctgaggtttgccacagacatggagctccacaaacaggggcgctcatgaaattcttaccatgcacccatgacctcattctggcccttgcttcaagctcttgacccatccaggtccttccaggtctggcttcagggattttgttcccagcctgccctcccccaaggctcttcctccccagggtcaatgctcacacaacgaagatgatgcagaagtacaggaagaccagggctgtggctccagctcccccgaatgcccctagcgtcactcctgatataggcctcattttgcctgaggatggattggagttgttttggggtttaccctccaagaactgggcctcttctcctcccactgcctgtagggccccagacttgggtaccccagtcccgcttcccggacagaaagaacaaggacggaagggaacttctcctgaggtcactgaggcatgagagtgctgggtgcagtctgcctttatttaaaattttgattagttttcaccatggaattattttacaataatttttaattttcgaaaagataatcacatggcaagattatttctcttgcttgctgagttgttttatttttggttcttaaattgtgtgcccaaagtgagtgcctcacttgcctcacactagtccaggcactggaaagcaaggcccttgtatccccaaacacacttgtccaggccccagctcctcccctccaagattaactcctcccctctccccaccccgcactcactgcttggcagcaagaggactgtgatgctgtgggttgcagggaaattccaggtctcccagctggaccctgagggtgggacatgtgtgttctcctcctccagaccctcccctacccacctgtgtactcgttttgcagggagaggctcagggaaatgtgctgggagcctagagggttctgagctcggcaggtgaattccccttcatccttcacatgcactcgaggcagctccagcaccccaaggttcgaggactgtgaggggctcagggtcaggctcccccaggtccagctcagcctggcagggggattgctgtcgacagcacagacaaggtgcagggactggccctccaggactgaaagggccgagccattcctcaaggttgtggatgctgtagagaaagagacagaagggcagagagagacaaagtgatcgaggcagggaggaaggatacagaaagagagtggtgaatggaacagacactgatacatgctgaattgtagggacatatgcacgttcactgctcactgttggggatgtaaacttgtccatctttaattagaacaatttcactctatctttcaaaatcagaaagacatatgacactgctatattttgcttttaggactttattccatacacttagatattccttgtgggagtagatacaacaatattcattgcagtgtttgtgctgtaggataaaattagtgccatgatcttccattagaagatgccacaaaatcagagactattcagacagtggaatgacacacagccctagaggagggtgcaaacagtctcactactgacatcaaaccacctctgagatcttccaggtgcacaaaccaaggctcaggacagcctggacagaccctggtcgattctggggacagactctgctgtgcattataaatttttgcccatgtgactatagtatgtatccaaaagaatatacctcagaactattggtgaaaataaaaggatgaggcaatattcaggagctggaagataagagtcctcaaatccttgagctgctgtgtgaatgtccctctacccttgctgtggggccaaaataggtgtgtgtgtggaggagttcaaggggagtgaaggggtgatgagaaggtgctcaggtggccaaaaggctgaggctgagggaggggggggccggggctcacccacaaaagggtctcaggtcaccagggtgagtcctggctctcccctgagttgaaggctctgctcctccagccccagggagaggactccatcttacctgtgccatctccttggaagacagtcatggtcaagttctgaggaggatctggaacagaaagacacggagttcccatcactttgaggactggggacactgaccctgtctccccaggagccccataaatggggaaggtggagccagcatcctcctgacccccaactcccagccaagattccaggacccagatccttgagtctgggtcccacatccaactggcctcaaggaatcccgatcaaagacccagacgtcctggcccagaactcacaggatatgttgagtcggacagccctggtcatggtcacgccggccccaggcaaggtcacctgacaggtgaggctggtgccatggtcctggggctgtgggatgaggctgagcatcgaggagcgagtgatagtggggtccagggaggacacggaggcccccatccaggtgatcgtggggggcgtcccctgttcacaggcccagggcacagagcaggtcaggttcctggggtggccagactccagggtccccgggatggagaaggtgggcatgtgagtcagggctggtgatgaaagggagacaggcaaaatgagggtgttggggtctgaagtgtggtgctgaggaggctcaggctctggtcttactcctcccctgagccagatatgcttcacctccaactccctcccaggatgggggtcccacctcagccctaccctgcggccctcgggccttcccctctggctggtcctagagccagagatttacctgtcacatgcacagagagcttgtcatatatgtagttccatttcctgcttcctctctccacctggaagtagtacttccctgaatcccccttcctggcatctctgatgctcagggagcagttgttggtctgtgggtccccaaggaggaggaatcgaccgtgggtatcctcttgcacttttccacttggggtgtttgtggccactggaatatcccatggtatatcggccccttccttgaaccaggatccataaacagggctagaggcagtccagttgtaatgggggtaaaggacactgcagggcacagagacacacagaccctcctgcacagtcaccgactctggcacctccagcctgtatcttgacagtaggtcctgggacgctgtggagaaacgagggtcagcccagcccccactgtccctctcttcatttgcccatagcaggggcagcagcatctctgaggcagaggcttcctgggctccctgtgtgagcagagaagggggagggagaggaggggcagggctgtgggacccacagggggctggagaggagctggagacctcagccctgcatggaagagaaactgcaaacccacatgctataggaactcattccctctgcacagagtgaaggaaaccctaaagctcagagaccctagagacccacccagggaggagaagagaccgtgtcccgcctcctacctccgggcttccctgaagcaccagggcctgcaccagacacgtaggtcctgccctcccggcctctggaccatcgtggaggtccctcctgtcttttgagcatctaaatgtggatctccgaggacctcggggcatgagagatggaggggccgtgtgctgagtctccctgtccaggctcaggtgcctctgctgcccttggtttgcgccaggaagtgcttcctccctggcctggcctgagagagtcacggggttgtgtagacctaaggctctcaactggggaggacttaaccccccaggacgtttgacaatgtgtggagataattgtctcgctgcatgggtggggtgggtgcttctggcatctggtggggagaggcctgggatggtgctaaaccccggccatgcctaggacaggccccaaaacaaggagtcataaggccccacatgccacagtgccagcgtcagaggcaggatgaggatgtcaggcctgtgggtcagggctggtgaggggaggggcttgcaggatcaggaggggcatccaaggtgcggtcctggggaagctcaggctctggtccagctcctcccctgagtccatcacccccggccccctcccaggacatgtgtcccgtctcagccgtgccctaaagccctcatcacatttgcctttggcctctcttggagcccgtgccttacctgtcacattcacagagagctggtcatatttataattccatttcatatttcctctctctacacaaaagacgtatgtccctgcatcactctctctggtgtctctgatgctcagggtacaatccttgttctgtgggtccccaaggaggtggaatcggtcccgagtctcctcctgcactgctcgagctgggttgtttgtggccactggaatgttccggcttacatggtcccctgcccggaaccagtagccatgaactggatcggaggcagtccagccattttgggggtaggagaaggagcaaagcacagagacacacaggccctcctgcaccgtcacggacttctgcattgtcagcaggtaatccttctgttccttagcccccactctcccacagagcaggggtggcagcagtagcagcagcagtagcatgtgtcgggttggaggtgccagggttgctgaggtaagtctgttcctcagggttcttctctcaggaactgagaactcaagatttcgaggaagccgcacaggaagttgggggtgggttctgaacggtgacctcacaggaggaacttcacacacagacactgtcagggccgggtcacccctggaagatccaccgtccactaccccgtccactcctggggaccctgaggccagagaggatgaaagactcacccagattccaaccccatgcagggcccaccccgcccactgcctccctctcagtgcccttccccttgggtgatattttccataaggtgaaaatgagtcccatgtggccagacctatgaagtacaggctgtggatgtctctctgtaggtcagaggtgacactaggatataagagatgggggtgcaggtgggatgagcaggcaacctctccttcctccctcagcggccgtgaggtggagttcaacacagcagagctagacactgtccccaaagagtcactgtgtagtggggagacactgaggctcctgatatctgagctctccatggcaggagcttcagtgggggtaccaggcagggtgtggtcgctctctcctatgttggggaatcagtctcgggaggactgagcagagagacacggggtcgtggaggtgaggattccgtgtgttgatacacaccaaagacacagagaagagcccagttcacaggaggcctgagaagctaaggctgtgactgttgtacagtgaggtctggaagggaggaatgttggatgggaagggacagatttctaaaggggcaggcgtttctctctcggccatggctctctgggttcaggatgggatccttcaccactgctctctcacaagtcctccttactccagagcatgaggggtctgctggccctttgttcctgcaggctctgctcccagggtttcaggtgaacaggagacgtggagcgaggacaccagccctggcgtgtccacgctcaatgatggacaggatttcatgggagaagaaatgcacctgaattcagcagaagagtttttgaaactgtatgctatgtactgggaggaaggtggggaaaatcctgcaagattcgccctccttagacccatgtcagcttttcttgaaacaatgatttttggggaaatgtaatacaagtaaataaaagtgccacctaaaaaaatgactcagtgattttcaccaaattatcactgttcaagaaatagaacatcacaagataattgccaaatttctcccatgagatgaagaaagaaattgcattcatttattcagccctgtgtttccccttcctataggccacatgcagttcctcctgaagatgccccagcctcactttaatgataatggtctccttgcttttctatgtagttttatcatctgagtgcactgccttcaatactatggctttgcataggtttttctaaagactatttttacataaaaaccacaatctgttttattttactcagctccatggatcttcccatccccatgttgtccccaattgcccataacctggagtagagtcagttggctgtgataattgaaaaggaaatgtgcaggattggggcatgcatagctgctcctctccctgacaccactaattcctgcatttgcagcttgtatctcatcctgcagaccaatctgctcctgggcccccatccttgccgtgtcactttcttcccgtaaggacagttgcagcatctcaatgggaagaagggctcgaccacggcccatctctttcccacagtccccagttggcaaagaaaagcagaaaaatgggaaggagagacatgaggaagccacagagaatctgcaaaggaagaacgtttgaaccacatatgactcagaggagctgatgggccctctagacccacttccataatttggagaggaagatattaaggaccagagtgacaagtgctacagctacatgtctctcctcaaaattcatttgttgacctttgaacccccatgtgatagtattagaaggcatggtgtttagataggtggtttggattagcctaataggattagagcctgatatggtttggatctgtgtccccaccaaatctcatgccgaattataggcctcaatattgaaggtgggttgtagtgggaggtggttggatcacgggggtggatttctcatgaatggcttagcaccatcttcttggagctgttcttgtgagagtgggtgagttctaacaagatctgcttgttgtctgtgtgcagcatctccccatttgctctatcctgctactctggccatgtgacatgctggcttcccctttgttttttgccatgattgtaagtttcctgaggaactccccagaagccaagcagatgtcaacatcctgcttcctgtacagcctgcagaaccacgagccgattattcctcttgtctttataagttacccagtcacaggtatttctttatatcaatggaagaatgaactaatacagaaaattggtacagaggagtggggcattgctacaaagacacctgaaaatttgaaaacaactttggaactggttaacaggcaaaagttggaagagtgtggagagctcacaaaaagacagaaagatgaaggaaagtttgaaacttcctagagactggttgaatagttatgactgaaatattggtcgtgatatggacagtgaaggccaagctgaagaggtctcagacggaaatgaggaacttattggaaaccagagcgatggtccattttgttatgccttagcaaagaacttcactgcattgtgcccctgccctaggaatctgtggagctttgagcacaagagtgaagattttcagtatctcgtggaagaaatgtctaagaagcaaagcattgaagacatggcctggttgcttctaacagcatatgctcatgtgtgagcaaagaaagaaatcactgaaagctggaaattgtatttaaaagggaagcagagtgtaaaagtttggataatttgcagcctggccaagtggtagaaaagaaaagcccattttcaggggaggaattcaagcaggctgtagtcccagagaccccaacattgaaaacagaggctcttttttcctggacaatggggcccgaggtttgtcacagacatgtggccccacaaacaagggcactcatgaaattctcaccatgcacccatgctcattctctcccttgcttcatactcctgactcagccaggtccttccagctccggcttcagggattctgctcccaggccaccctcccccagggctctcccttcctctccagggtcaatgctcacacgatgaagatgacacaaaaggacaggaagaccaggctggggctccagccccccttgaccgcctgcagcatcactcctggagggttctgagctctgcaggtgaattccccttcgtccctcagatacacttgaggcagttccagcagcccaggattcaagggctgtgagaggctcagggttgggctcccccaggtccagctcagcctggcagggggattgctgtcaacagcacagaccacatacagggactggctttccaggactggaagggctgagccattccccaaggtggtggatgctgtagagaaagagacagagggtcagaaagacagtgatcaagacaaggaggaatgatacagaaagagactggtggatggaacagacactgatacaggctgaagtgcagggccatacacaccttctcagctcactgttgggaatgtaaacttgcccacttttagttgagaacaacttcattttattaaaattagaaagaacgtataacactgctatattttgcttttaggaactatgctatacactcagatattgcttgtggaagtagatttatgattattcattacagtgtttctgcagtacgataaaattagtgccatgattttccactgggagatgctacacaatcagagtccatccatgcagtggaatcacacacagccctagaggagggtgtgggcagtctcactattgatattggagcacctctgagatcctccaggtgagcaaaccaaggcccagggcagcctagatggacgctgggcgattctggggacagactctgctatgcattttgaattttcacccatgtgaccataacatgtatccaaaagaacgtagctcaaaactattggggaaaaggaaagatgaggtaggtggtgttttcaggagatggaagaaaacaggcctcaaagcctgtgttgtgaatctccccctgcctttgctgtggggctgaggggtgtgtgtgtggaagagtcttaggggagtgatagggaagtgtagagtcatcagcagcttgcaacctcaacatggaaaagctacaggcactcatctccaacctatgagagcagccacgtggcctacacctgtcaaagccacaggcagaactgcccacggccttgggagctcaccccttgcaccaatgtgcccaggatgtgggacacaaagtcaaagattattattaagctctaaggtttaatgtctgcctgcaggaatttggatttacatggagcctgttgccactttctttggggcaatttctcctttttggaatgggaatatttccccaatgcctgaaccaccaatgtatcttggaattaaataacttgtttcctatttcacagggtcataggtgggaagaacttgccttgagtctcagatgagactttgcactttcagttgatgctggaaagagttcagatgttggaggactgctgggaagaaattattgtattttgcaatgtgagaaagagatgagatttgaggagccaaggcagactgatacagtcttgatatttgtcccctccaaatctcatgttgacatgtaatcccttatgttggaggtggagcctggtaggaggtgtttgggtcatggtgccctcccatgacaatgaattctcactccattagttcacagaagagctggttgttgaaaagagcctggtgtctcttcttgctccttctctcaccatgtggcatgcctgctcccctttcaccttctgctatgattagaagttttcagaggcttcactaaaagctgagcagatgctgattccttacttgtacatcctgcagaaatgtgaaccaaataaacctctattcattctaaattactcagtctcaggtattcctttacggcaatgcaaaacggactaacacaatactttaagtcctctccagattattgataatacctaatacaatgtcaatgctatgcagctagttgttataatgtattttaattgtattatttttcatgattgtgttgttgttcttattggtttttgtttttttgaatatctttgatccccagatggctgaatccaaggatatggaatgggtggatatggaaggtgcactgtatccatttgaaatgaggccacttgtatgggtcctaattcaatataacttctgtccatctaggagagaagattaggacacagagacacacaaaccatgtgaggacacagagagaagtcagcagctacaagccaagtagagagttccagaaggaaccaactctgctgacatgttcagcacaagaaccgtgagaaaaaaaaattgttgtttcagcctctctgcctgtggcacgttgctatgagagcttgagtgactaacaaagtggataagagaacaaggacaaggcggagacaggaacagctaggggtcacctcctccagaaggcctctcctgactttcctccattacaaagagctgaccactcccttcccaggacctgtcctgaatatctctccagcatctgggtcacttaggagacccccagtgcttttctatttttaagagtcttcatttaccaacttggggtccctggagctcatatgccatgtaagattcacctccatctatcctctttaactcagcatctgtttggtactcccggtgcacggaggttgagggatgagctccttgtctctccgtgaccaaaacagagtcatttcaggaagtgccaagtgaggggacaatatcttgccgagtttactccactcaccccacataccccaagcccttcatgttgcctgaaactctcgccttcagtgttacctttgagtacaagtgttcagatctcaaaagctgttacaagcattgcccaattgaatgacagaggaggaagggagactgggaagtggactaaggcctagtgggggtgggagggtacttctgggagaccaaaggtcagtgagttcaccaggaagcatgaaggcgtggggctgacaccagcctaaggtggacagatttatcaaaacaaaaaaaaaaaccatggaacatatgtggttgaatttgaatttcagataaaaactttttttttttagcgtaagcatgcctcatgcaatatttggaacatacttatgctaaaaaatatattatttattctctatctgaaagtccatttcaagcaggcatcctgtattttatctgagacgaccagccccctccagcaactgttcctcccctgcatccatcaccaccactgctggtagcccagataaggggagttccctgtggactttcattgctgtttcctcactgacctctaaattgggggccagagggagagcccccaaacccctctgcacccatagccatgcccccaggacagacacagctctccctcttctcttccctggagggggctctggaaggaccagctcagcaaacccgaggccaggcagcccccaggagacccagaggacaagtggcaaggtgggctggggactggggaggaagggaaaggagtccttccacccttggtggtgtccatgtgccctgctccttctgctacccccaagacagctggactgactctgacccacttcacagctattggttaggggaagtggcccttccagcctcagatgctccagtggccacaaacaacccagatagaaaagtgcaggaggagacccagggacagttgcaactttccagggaccgacagatcaatgactgctccctgaggggtcatacttctttcacatggagggagggaatatgaaatggagatacaaaattaaccagttgtccatgcatgtgatgcgtaaggcatgggctccaggagaggccataagcaaaggtgctgtggcggcagggcagggctgggactggatctccatcctgggatggcatggcgttgatgggctcaggagaagaactggaccagagcctgagcttccccctgggtggcaccttggatccccgtcctaatcctgcttgtccccctctcctcaccagccctgacccacaggtccaacccacaggcccgacatcttcatcccaataaccctggagtcggctgccccagcaatctaacctgctctgtgccttgggcctgtgagcaggggatgcctccgacaatcacctggatggggcctccatgttcccactgggctccacctcggtgccctccacagtccaggaccacgacgccagcctcacctgtcaggtgactttaccgagggctggtgtgaccacgaacagtaacatccaactcaatgtgttctgtgagtgttgggccaggatgcccaggcccctgactgggtttccctgagggcagtgggatgcgggtcagggttggacacagggatctgggtcccggtatctgggctgggagtcaggggtctggaggatgctggctccaccttttccatttatatggctcctggggagagagggccagtgtccccagccctcagagtcacccaccaccatgtccagctaatttttatatttttagtagagatggggtttcgccatttggccaggctggtctcaaactcctgagctcaagggatcctcccacctcggcctcccaaattgttgggattacaggcatgagccactgcacccagcctcagcatgagatttgaaggggacaaacattcaaactatatcaagtatagaggaggatgtgcttatgttacatgcaaatactctttcattttctatcagagacttgagtatcatgggtttttgtatccaaggggggttcactcccccactaataccaagggacagacgtatctctttaaagatgtgtttccaaatacagtcacattcttaggtactggacgttggatttcaacagataaatttggttggggagaggaacacaattcagaccctaatatttaccttccccttttctctgatctctggttccccatgagccaccaacatgtgtattctccaaaaaaaaaaaaaaagttatctttttcctgggaacgctcatgttgggaaatatcacaccctcccctccatccacagagctcagaaaaaaggcctctcacaagaaggtgtaaacggaggagggtgtgggtgtggttccctcagacctcagagctgacccctgaggtcctgcaatcctaggcccagccccacttctgcctttgggcatttcatacccatatggaaccagctgacaggaaccaggaaagtggtaacgtctccgtcctcctgtggatttttctatgccattgttctcagttgcccatgggccagagaagggagagaggaccccctgccaccttgaggctgaaaggtgccaatctgggactccccagtggattcagaggcctcaccatctccactgagagtgtggccccccttgggttagatctcccttttaaccttagagctgatccccgtggtgagaatgaggacctatggacttcagcactaggggaggacagtgtggggtcaggcagcatctgtgtgcacagctgaattgaagcagagctgggtttgataggaagagaaagggagagagggggtcaggggccttcagtggctctgctgtgggttgatccttctcactcctgggaggtgctgccaagagggtcctggaaaagtttctgagcccatcagcccctgtgcctgtctccctgcaaacttgtgggttccctcttctcttcacaggaggatttctctgaggaaatgtcttccttcatttcctctccaccctatttcatcttgctctgtccctaccacatcattcaaacggttctggtcaggattactaacgacctccaaagtgctgaaccacctgtacaatttctattctcatctcacttggatgcctctctctcagtagcattaggctcagtcactcattcctgtttaaaacacttcatagattggcttctgggccacctagagctgccaccttgcaccagttgtgggcaacacacacatactcctaagtcacctgcctggatcaaactatatgtaacatactagaaacttcatgcctccttctaccttcctaaccatcttccttatctttctaagggttcctcctctgttcctgacacctaactgttgaaatccatcctattccaacatgtcctatttgaaatgcgaaatatgaaaaggttcctatttcatatactgttttaaaaacacaagctaccaatgtcaattctttgattttcagatcatcatattctcatatcctatgatgatagtgaaggaggctgaggggagggtgtgtgggtcctccctgtacatttctttgcaacttcctatgaatctgtagttgtttccaaatcaaaaataaaacaaaaaaacaaaaaacgaccatgaaggcacatgagaatgacaaccaagagactcgctgatgactggtaaagttggatgccaaaccctgaccatttcctgtctctgtggcatctactccgggaaatgaagtgggcatctccagcctcatatgttccaggcagcactcagtgtttctctcctcaaacttcctgcagggggcgttccctctggccctttgggatgtctgagcatcagtatcaagtggtatctgtttgcatctgcctgcatcccagtgtcatcctgatttccaattcccatatacaatctatccacacggcctgtcagttaaacttttttttttttattagatggagttttgctcttgtcgcccaggctggagtgtagtggtgtgatttcagctcattgcaacctctgcctcccgggttcaagcgattctcatgcctcagtctacctagtagctgggattacaggcatgtgctggcacgcctggctaattttgtatttttagtagagacagggtttcaccatgttggtcaggctggtctccaactcctgaccttgtgatccacccgcctcagcctcccaaagcgctgggattacaggcaggagccaccgtgcctggccttgtattttttatttcttagttaatttcactggctaggacctatactacaatgtcgaatagaaataatagggcagatattccttcctttctcccaatcttaggggaaaaagtgttcaatatttctttattacgtatgatgctaattgcaggtttttagatgctcttaatcaaatcgaagtttttctcttctagtcctaatttgttgagattgttttaaattataaatgtgttttaaattctgcccagcgttatttctggagtaatcaagaggcacatttgatgtttctcttttattctggtagcgtggtgaattacatttatttttggatgtgaaaccccacttggtcatcatgtattacgtcaattttatttgttggattggatttacttatatttaaatgaagacttttctatgttcatgaggtgcagtgatctgcagttttcttttcttgtaacgtcctcatgaagctttggtatcaggtttgaattttgcctcatgaaatgagtgttttctccttctctatttactgagggagtctgggaaagtttgatattatttctcctttaaatgtttcgtagaattccacatacagtgccatcatgattaattaattacctatgattgagtggctattaagcaaatgccttgaaggatcgaatggcgatgctattcactgctgtgtgagcattaatgaccacaaagactgtgtggtaaactctctgctcctaactctgctggaaaacctgcaaagggcaagtgccaagctcaggtcttaccttgtaggtcaagttatggttgtaaactacagaaatgccttatgacttcaaacaatttcatgtcatttgactatggggacaatcttgcaaaaaaaaaaaaatcagaccccaaatttaattgtatttattgaagaattacgacataatttgaatttaaagatttgtctgcgcttcttataggaaatttagggcagttattggaaaggactgaggggcttgggcttggaaaggggtcttgcatgaagatcaagtacccaagaacatgtggatgacccctatgcatggtctttggataaagtcgaaaatcttcaacccccttgccccaagactttttgaaactctcttgataccagaatatagcctgatttccttggtctggagagattagtctttccttactggaagactctaataattctgcttggagagattgcccaagcacaggaaggtgctgagtctcttcaaaactcatcccaatcactattcattccagaccaagaataaaatgcaagtctcttccatggggtaaatgcaatgcccgacccttgagaagatcttacattctaaaggaattattggattctctgatttatatcagcagacacctgagaaatatatgttaaagtggacactaggaatcttagaccaacaaagataaaatattacactggcttagccaaatatattgatacgggtgtactaacaaaagattacagatacaatgttttggctcaagaagctctcaggtggatgaaggaatttgctttatgtttgattgaaacaatattatcactatattccaatgaaaatggactcaacaatgacccaaatttaacgaggatgatgtcagaactttcttggcataatggagaaaaaataacccaaaggtttagagagttaaaaatgttggaaaataaaaaatgacaaaagttcaacctgtaccctcatctcctctgctcttacccctcaagtagtatactggtaaagacagcacaagtgtccatgaaaagctctgtgaagactaacctggttcagcctattttttttcaccttatatattctgaagccattctttgcctatttttgccttacatattctgaagctattttatcatgtgcaggtaaatttctaatgtatcttcctagtatattgaatatttaatccttaaaaaattggcccttttatctccattaacactttgtttggtaaaagatatattttctgatattgacatacttatgatggtcagtttaatgtgccaatgtttctaggttatagtccccagaacattcaatgaaacgttaatctaggtgttgctgtgaaggtgctttgtacacaggattaagatttatgatcagtttattggggatgacagaaagaaatactgcaacggatataatcacactgctttcaatcaggatgatggaattgtcaaaggcaatgtgtcattacttaatccctagagataagttgagcacattagctttaaagaggatcagagataaaatgggaggtcatcctacccctaccaaagaagctcaattcttgatagtcacctttggattttggaggaaatgtacaactatgattggatgctctaacccacttactacgtaaatcttaagacttccagtttggagttgttctcagttcaaggaaaggctctgcagcaggtccaggctgtagtataagaagctttacaacttgaggtttataactcaagattaaattatacttgaattatctggaataattaagaatgtcggtgtgccccagagtgaagacccctaggacttttgttgcaaagccatgctctgtttttgagaacatgatggatctcttgagaaagagcttctgacttattaccaggccttggtagagactgatacccttactatgggatatgaagcgaatatataatacaaactgcccatcatgaagtaggtgctctgtgacccatcaagctaaaaggttgggcatgtgaagcaataatccattatgaagtgaatttggatatgatataactgacttcaagatgggcttcaagaagtccagaaatcacaaccaagtgacatgagcaggtgacccagattcctacaactcctcctgggatattgccttattttttcatgaaatcacatgtgtgacctcatgggcagttctttatggccattgcttgaggaggaaaacatttcatcttggttttcaagtggttctgctcaatcaactggcacagcaaggagtggacttttgcatcatgacaaactcaaccacagtgaacctgagagcgggactgaaggaactccccctagtggcagaatttcataaatacatttggcttttcattttgagactgagaggtcagaaggacagatacaaactgaaccatgcctacagcgttaggtaacacattttttcccagaaatttgtccattttctataagtattcaaaacttttcatacagcttactactttctgcttattttgcattagattaagtaatgttttctcccttatattcctgcatactagttatttttgccttctatatttctggactaattgcaactgaggtttgcccattttattatttgtatcaaaaactagctgttcgtgatgttgttcctttctactgaatatgttttctatgctatgtgctcttatcatttgatatttccttctctccaattccttttggttttgttgttctttttctaagttcttgaaattaaagcttagtttattaaattttagcttttcccaccctagcatatacatttaaggttatatatagttcctctaataaatgctttagttttactctaaaagttttatagtattttcagtatccagttttaaataatttcttatttgtgttatgatgataatgatgacaattttttttaagatggagtctcactgttgcccaggctggagtgcagtgcctcccagatccaagcaattctcctgcttcagcctgctgagtagctgggattacaggcacatgccaccacacccagctaagttttgtattttttttttttcagtagagacagggtttcgccatgttgcccaggctagtcttgaaatcctgacctcaagtgatctgcccacctcggcctcccaaagtgttgggattacaggcatgagccgccacgcctggctgtatgttttgattatttaatctatgacttattttaagggattttctaagtttccactaattatgtacagttacatagacattggtatataattacattttattacttattttgagcttaataacattgaaatcaattaacatattctgtatggtttcacttctctgacatatgttgaaatatacttttggcccagtatatggtaaaaaaaaaatttttaatactccatgtgtgctcaaatagaatatgttttctgcagttgtttggagcagtttctacctatggccatagaccaagtttgttaatcatgttatttatgtatactatgttgcatatccttaacaattctcttgtttgtgtgtaccatcagttattgtaaaatatgtgttaaaaattgccctccataaatgtggattaggctattttgttttcactttgcctattcttgccttatgtattctgaagctattttatcatgtgcaggtacatttcaaatgtatcttcctagtagattgaatctttaatccctacgaagtggtcccttttacctccattaatacttctttttgtaatagacatattttctgatattgatatattcagttttatgtgtcagtgtgtctaggtaacagtctccaggatattcaatgaaacattaatctaggtgttgctgtgaagatgctttgtacacatgattaagatttataatcagtttaaggaagattatgcttcataatctgggtaagcctgattcaatctgtggaagaccttcagtgcagaactgaggctgctctgagaaagaagaaattctccctgtggattgcagcttgagctcatgacgaagtcctagcttggacttccagatgaccctccctatagatctcggacttgcctagccagctcccacaaaagcatacgccattttcttgcaatgagtctttctttcttttttttgaagttcctttttttaaacttttattttaagttcaggggtacaagtataggtttgttacataggtaaatttgtgtcacgagggtttgttgtacagattgtttcgtcacccaggtattaagcctagtacccattagttattttttcctgatattctccctcctcccaccctcctaccctccaaaatgccctagtgtgtgttgttcccctctatgtgtccatgtgttctcatcatttagctccctcttagaagtgtcaacatgtggtatgtggttttctgttcctgtgtcagtttgctaaggataatggcctccagctccattcatgtccctgcaaaggacatgatctcattcttttttatggctgcatagtagttcattgagtatatgtaccatattttctttacccactctatcattgatgggcatttaggttgattccatgtctttgctattgtgaatagttgaatctttcaatacatacatcctacagacttgttttttccagtggaaacttgactgactacatcagtttcttttggttacggttttcatggtatgtcttttttcatccttctacacacaacctcccctatatttatcttttatgtagatctcttataaacaacgtatagctacactttcccccagtcttactatgctggtattttaactgtagcatttaattcacttgtgcttaatgtgattcttagactgtatttgagtctaaatacagaatcttatacttgtattctacatgttctatccatcctttttttctttaatctcttatttcttgtcttctctggtttgactgaataatgtttctatcaccttttatacttcctctagttcacaggtggtaaacttggcttcgaatctttaagtaaatttcctcgagattacaataataaattatccaaatgtaacattcatcataacatttaattttctctggaaaaatataaagactttatgtaatataaattctatttacactcttctgaactttatgttattatagtttctgggctatataatattggtatttcaatattacatttgatgtttgacccctctacaaaccatcatttttacaacaagtatttgtttcattttgctcacatatttgctactttcctaggttttcattttttttggatctcaaaaatctaatctgggatcactttcctaatacctgaattatatgttttagaatttatttgagaaatcttttctttattaacactcacatattttggttttccttaaaatatctatatttcactttcagtcttaaaatgtgttttcattgagtaggctttctaaaacaacatttatttctcttaagccatcaaagacatctttctattgcatttagccttccaatattgctcctaaaaaagtcagctgtcagtctaattgtggttttttgcttgtttgtttgttttgttttgctttttctgagttggagtctcgctctgttgcccaggctggagtgcagtgatgcaatctcagctcacttcaacctccacctcccaggttcaagcaattctcctgcttcaacctgcagaagtacctgggattacaggcaagtgccaccacaccgagctaatttttgtattttagtagagatggggtttcaccatgttggccagaccagtctcgaactcctgacctccagtgatccacccacctcagcctcccaaagtgctgggattacaggcgtgagccactgctaactgtggtcttttaagtgtaatctatctttttatttttcatggctactcttaagaattttccttaatagttggtcttcattaaatgctttcttcaatttcactggaatagtggagactgggatttgtaagaggaagctgtggaaatggacatggggtattggtgactggtgaggaattgatctggggaaatctggatggacaagatcatgtagagagccttgagcagaaagatgatggatggaaaccttattttggggagtcgtgaagagttctgaacagggggtgacacagacacctggtgctgtggcctctgggcctactccttttcagccttagaagaaattgccagcagaaaccgtctgttaaaacagctaatcaaagccgggtgcggtggctcatgcctgtaatctcagcactttgggaggccgaggagggcagatcacgaggtcaggagatcaagaccatcctggctaacacggtgaaaccccgtctctactaaaaatacaaaaaattagccgggtgtggtggtgggtgcctgtagtcccagctacttgggaggctgaggcaggagaatggtgtgaacccagggggcgaagcttgcactgagccaagatcgcaccactgcactccagcctgggagatacagcaagactccatctcagaaaaaaaaaaaaaaaaaaaaagctagccaaagccagatacaaggcattcatttacaaaaatatacagactttatgaaaacctttgtgtcagggcctttgttagctgttttacagctaacaaagctgtatgttagctgtatgctttctttgacctttcacaataatctggttagatggaaattatttccctgccttacagagcagggacataaagcgacttgctcaatagctggcatagatggagttgaactcagttctcttggacagaagtcctgtggtctgccatatatacgaaggtatttatatagtccatttacaacaaaaacattaattttaaaagaattggacacagtgttatgggctaaattgttcccttctaaaattcatatgttggaagtcctaaatctcaatatctcagaaggttactgtatttggagggtctttaaatagttaatttatttaaattaggtcatggggaggccctaatccaatatgactagtgtctttataagaagagaagattaggacacaaacacactcagaggaaagaccatgtgaagacacaaggaggagacagccatctacaagccaacaagagaggccttagaagggaccaaccctgataacaccttgttctcagacctctaacatctgaaactatacgaaaataaagttctgtgtttatgtcactcggtttgtggtacattgctgtggcagccctagtaaccaatacactgagaggtaccatgttctctccaatcaaggttatggctttggacaattcctcacttgtgtatcttgatttctgagtactcagtgtcggtgacctttggttcctgaggttgcaccttgtggaagtgtaggacagcgtagtggagctcctgctcatcttctgagatggggccagcctcagcagggtggtctgaaactatgcctgtctggaactggtgctgatgacccttaatggaagaaaagaaaagattcagggctggacaataggttctcaaagaaagcagccaaggatcagaaagggagtagaactgatggaactttattatttatccattcatttattattttattttatttcattttattttattttatttttgagatggggtctcgctctgttgtccaggctggagtgcagcggcatgatcacggctcaggcagccttgaacacctgggttcgaatgaaccttctgcttcagcctcctgtgtagctgggactacaggcatgcaccccacctggctaatttttgtagagatggagttctactatgttgcccaggctggtcttgaaccctgggctcaaggaatccacccaccttggcttcctaaagtgctgggattacaagcatgagccaccacatccaccgcattcatttattttaaaatatttaataattaagattggcaagcccttagtgagtgtttacattaatcagtcatattctattctcaaaaaatgctttgcagtggattccatgattacattcatcttacaaacgggaacactaaggctaagagaggctccacatgttgcctatagacacacatctatataaatgcaccactgagaaggactcagaaccagcttattgttgtgtaggtcatgtgacatgtgctagatgttaagccatgaagaaagcagacacagtcccagatagtaggcagtgtggttttctatgagatgcagttagttaaaaacaggaaacaaaatcacttttttaattcatgatagcagatattttgaaatataaagcaggggcaggagtggcatatctgattcctagacaggtactggaggacagaacagagaccgggtcctgcagtacaggccaccggacgccctctcctgtaccttctctttctaatgcccctgaaaacttgaaagtaaagcatggtaaagaaattatgtaatgattcccaacaaagtggggatttaacacacactaagtgtgttatatctccaaataaaccaagaggcaatacaagaaattatggaatgagcaaataagaaaaagtgggaaatctctggggaaacaaaatattttatactggagtgtgtgtgtgtgtatatgtgtgtgtgtgtgttcagggaggcattggtgacagtgcgtgaatggctacagaaatgagatttatgttccactcatgtctttcctccatcattgggataatatattcctgcctgcattcttgctacacaaatcagtggcaaagtccgagactaaaggtgtgaatttctgcaggagaaatgacagatcagcacaaaagccctactgaatgaagaaaataacaggtggaaattgcctctccctgggcttcccctggccaccttcccccatccacacatcccagacttttggaagacagtctaggtattacctcccccagcaccaatttttcctgagggtctgaacaacaggaatcatgacttgaattattcttggtcagttctcactcaggctatggtagagtaactggcaccctcccagcataattagaaaactatacatagtatgtaaaatatgtgtttcacaaggaaaacaggcagacaggactgtgacatctgaaagaaaggaaaccaatgaggtgagtctcatgatcaaatgacaatttccaaactgcagtacgtggaggataaattcaagcagaacacaagagtcttatgaaactgtggaggcagcaactgcagttcaagtgggaatgatgtgggtggaatttgtagagcagagtacagagagaaaaaactacacagagaaagaactccaaaaaatatgcatagaggtccccttgaatctttggctgaatactaagctgtatgcacagagtgaaaggctgaaagcctgggtacgtgctgctggagaaggaacagctatgagaaagctggaatgaaggcaaatataaactcaccctgccaaagcttttgtaaaaatctttgaatggtcaagacaatccactaataaattaactgcattcgagaacaaagctcaacaatttttaaaggaagattaaaatatccggataatcaacaatgtaacacgatgtccagtatgccaccaaaatcactacctatgcgaagaagctgtggaatgtaagcaatgaaaagtatatcagtaaatagaaacatatcaccaaatgatggaattagcagaaaagaagattaaaaacggctataaatacacatattcaaagacttaggccaggtatggttgttcatgcctgtaatcccagaactttgggaggctgaggtgggcagattgatttgagctcaggagttcgagaccagcctgggcaacatggtgaaatcccatctctaatccctaacccacaaaaaaattagccagatatggtggctcacgcctgtagtcccgactactcgggagtctgaggctggagaattgcttgagcccaggaagtggaggttgcagtgaactgagaacatgccattgcactccaccctgggcaaaagagtgaaaccctctctcaacaataacaaaaacttaaaggaaaacagaacataataaggaaatgaaaactataaagaactgggctgggtgtggtggctcacacctgtaagtccagcaatttgggaagccgaggcaggagtactgcttgagcccatgagtttgagaccagcctgggcaacatggtgagaccctgtctttacaaaaatttgtttaaaaaattagccaggcgcagtggtgcatgcctgtagtcatagctatttgaaaggctgaggcaggaggatcacttgagcctaggaggtcgaaactgcagtgagccatgttcatgccactgcactccagcctgggcgacagagtgagatcctgtctcaggaaaaaaaaaataaactgaattgaatttctagagatgaaaaatggcaatatctaaaaagaaaagctaatagcagattaggtacggcagaagaaaatagcaatgaactaaaaaacgtagcaataaaaactttccaaactgaggcacaaagaaaacacaaaaacgaaaaataaataagcacagcttcattggcctgtgggacaatatcaagcattctgacacaggtgcaactgggatcccagaaaggggaagggagttaaagaattatggaaaaaacaatgattaaaatgttttcacaataccaagtcatatatccaacaatatctgcaaataccaagaaagataaaaacaaagaaaaccacacctaggcatgtcataatcctattgctgaaaaccaacaaggaaaagaaatgtgccctagggaagccagatgattggacaaccctgctagaggataaaagtagtaactctcctctcagcagtctgatggaactgggtaaaccaaatttgatgttccaggtctgataaggagaggcccagtaaacacctcaaaccttccgttaggactcaagaagggttacagattaaaagtaagggtccgctgggcacagtggctcacgcccgtaatcccagcactttgggcggctgaggcaggtggatcacgaggtcaggagatggagaccatcctggctaacacggtgaaagcccgtctgtactaaaagtacaaaaaaaaattagctgggcgcggtggcgggcacctgtaatcccagccactcgggaggctgaggcaggagaatggcgtgaacccaggaagcggagcttgccgtgagctgagatcgtgccactgcactccagcctgggtgacagagtgagactccatctcaaaaaaaaaaagtagtaatattttaaaactatcaaaaaggcaaaaaagggagataaatataaaaggacaaatataaatataaagcagagcaatctggtagaattaaactgagccaaatcaataatcacattaaatataaatggtctaaacactccaattaaaaggaagatattggcagacttgataaaataggtagaataaatgtgatatctgtaagacagacacaatacatatgaaggcacacatgtgttaaaagtaagaggagggaaaatgcataacaaacaagcactaatattaagaacactagagtggtaatattaaatcagacagtgtattttaggaaaagaaatattaccagaaataaagacatttcataatgataaacaagtcaattcattacaagatataaaaatcctaagtgcatatgcaaccaatcacagagcatgatttaacaaaataaattgtaaaaataagcagacagagaatcactaaggatatagaaggattgaacactagtgtaaaataacttgacctgattgacatttataaaatactacatccagtatcttcagaaaacacattctttgcaattgcacatgtaacattcaccatggtagactgatttttcatgtacttatactaccagttactgagataagagtttttaaaaaatcgactatggagtgtgcgccactctaatggagaggagatagagtggcaaataaacattagctcgccaactagaccatccagaaggacacgttgacattcatcaaggaagcaacatgacccggagagcagagaagaatgagacaaggcagctccccaggattggcatggagccaagggaggctccccacgatggggaaacagtgagcaagtgacagcccccaaggacccacacttctgccatggacctttgcagtcctgggcatgagagatcccctgaagcctccagactgacatggagagctgtgcggagtctgggcagggccactgctcaggcccatgtggagccccaagggccttggacctatgagcagctgggcaccaggtgtcatagcttcaccaacaagagaggccaggttctctcacatgctctcagggtagggaccacatttatggtgctgaggagctgacagattgcatacctcacctctgctacagctcgccagagaaagcccactggcctgggaccccagcatagccacctcacccctgcctgagcacttgggccagtagcagctctcgacttctctgggacagggctcccagaggtaacagacaagtctgccattttttctgccgccacagctcccactcctactcccccgaggctggagaaggagaaaagagcataaggactatcactggcctccaacacaccggaactgctttatggaaaagcagccagaccgtatcagtgtgggtccctgcccctgttattcctgactgagaaggacatcctgacccgggcccccagcacagctgccctgcccccacctgagttggtggcagttctgtgtttctctgaggaggatatcccagggtcaacccacaggctctttgccattgccactgcagtggtactgcccttgatgtcttcaggctgggaaaagaataaagaccttgatcactttgctggcacctccaacacactacaagcaccatacagaaaggagcccagtctcgcttccctgtgggacccctactccctgctcttcaccaggcagggcccctggctggggcctgcagcacagcggccccacccctagatgaacgttcccattggcagtggctctgtggctttctggggtggagctctcagagcagctggcagcccctctgccattgctgctgcagccatgctgcccttgctgccctcaggctagggaaggaacaaagagcctgatttatttggtggaacctccagcatgccacagctgcactacagagaggagcccagtctctcttccctgtgagcctccaaccgttactcttcaccaggtaagtccccctgcttgggcccacagcacagctgcctcaacccagggtaattattccaattggcagcagctctgcattcctctaggatgaagccccaagagacaaggaaaaagccctctaccactggcacttccaaggtccctgcccctgctgctccaagctggggaggaaacaaaatgcctgggctcaccacggggctgtagtgtgcagcctgagtgccaagtcaagatctgtagccagcacttgagtgagagaggagcccacactctcagagcactaggagggagcatggctgcaaatgtgaggaactacagaggattcatgtggctgaacaagagcctacctgccagccattatgcttaagcaccacctattggatcacatccaaacttcaacaccaaaaatactttgctaatataccccactgtgaaactaaggacaagaatttagcaacaaataaagatcgtgcacaaagcgttggccttctgaaaacgtccagaaacaaagccaactgactatactcaaatgacagcacaagtaagggaacatgagcccacataaatgagaaagaaccagtgcaaggactctggcaaatctaaaagccagagtgtcttcttacctcataatgaccacactagttccccagcaaaagttcttaaccagaatgaaatggataaaataacagacgaaaaattcagaatctggatgacaatcaagattattgagattcaggagaaagtagaaacccattccagggaatcaaaggaatccagtaaaacaattgaagagatgaaagatgaaatagccaccttaagaaagaaccaaactgagctgatagagctgaataactcactataaaaatttcataacacaatcagaagtattaacagcagaataaaccaagctgaggaaagaatatcagagcccaaagactggttcttcaaattaactcaggcagacaaaagaacaaagaattttagaaatgaacaaaacctccaaaaactgtgggattatgtaaagagaccaaatctacaactcattggcatccctgaaagagaaggagagagagcaagcaacttgaacaacgtattggaggatattgtccacaaaaatgtccccaacctctctagagaggtcagcatgcagattcaggaaattcagagaaccttggtaagataatatataagacaaccattcccaagacacgcagtcatcaggttctccaaggtcaatgccaaagaaaaaatattacaggcagctagagatgcctgtaatattgtaatagtgatgagcagtaatgactttgggttgatttgggctgtctactctagggcttgtgtctaccacattccttgtacttaatgcacctgacacagactaagttttgttcatttctttttctcaataatcaatgccataagaaaagactaatattccaggaaatatgataatctgacatatgaggagcataaatacccccagcaaattaactggagtacgtatttcatcagaactattagattcagttccaaatgttactattttaaattattgaaatcaatactttttaaattattactgagtcaaaaatttaaaatgtcacatgtggaaccgcagggaatgtcaggtgttaatgaagaaatgcctcagggtccttacttagggcagcattcaaaagggataatgctgaatggaaattaaggtctctgtcactcaccctggagcctgagaccatgacggggttcacatcatccgtgttttgcactggctgggctgctttcttccttctagtcttcactctgagggaacagccctaagcctttcagcctggttatttggagcctctttccccaaaagaaaaccatctccccactccctatggagagtacagaagtaattaagaggtccaggtgctcacatgagcccaagagttggaccacggtttcaaagagaccccttgcttggttcagctggtcaacggggtaattcacaccaccactaccctccctttcctcactctcgactttcccaatcaccccattttcctccactcaggttttctgagattctgccacctgtgtgcccttcccacatgaagtctttctgtgcctccctggagcccactctcacctgaagatgaagcaaacacagaggaaaaccagggttgtgatgctagctccccagactgctcccaggacaccaccagccctgccttctggtttccctataatttgaattttaagtgaactccagttctaattccaggacatcctcccaacagccattcctctccaccttccactaatgtgaccacccccatccaggactcagtcactcaccatttcactgccctgtgaacccggaaccagcctcttctctctccatgactcccccttcccccaactgcaagactgaggacgttgtgcccccagccactcttgtctgggccttggaaacatcttctccaagcttcatttctctggagcagttaggggttgaattatgtctccccacaattcctattttgaagtcctaacccccagcacctcagagcatgacctgatttggagaagggtcatagctgatgtaattagttataatgaggtgttcctggatcagggtgagccctaatccaatatgactgttgtccttataaaaaggggaaaatgtgggtcgggtgcagtggttcacacctgtaatcccatcattttgggaggccaaggctagcagatcaccaggtcaggagatcgagaccatcctggccaacatggtgaaaccctgtctctactcaaaatataaaaattagctgggcatggtggtgggcgcctgtagtgccagctactcgggaggctgaggcaggagaatctcttgaacccgggaggtggaggttgcatatgtcagattaccatgttgcagtgagccaagatcgcaccattgcattccagcctggcaacagagtgagaccctctctcaaaaaaaaaaaaaaaaagggaaaatgtggacacagacgcacatgtggacacagacaccaccatgtgaagattaagtcagaggtcgaggcaatgcttctttaagcctaggaacgccaaagactcccaggaaaccaccagaagccagggaaggagcatggaagagattctctcacagcctcaaaaggaaccaactctaacaccatacatgatcttggacttctgaccttgagaaccgtgagacaataaatccctattgtttaagtcgtgcactttgaattactttgttatggcagccctagcaaactcatacaaggacccaggcttctcttcccccaattgtcacctcttagcagactcctgacctggcagcagctgggacagagctgctctgggatgttctgggcctcaaagctgagcctgagacttgagctgaatccctggcaggggctcagggagctgttgaccaagggtccggctggctgggggtgactgtgaaggagccatggctgctgttcccatccctccagaatctcctccccaagctgccagtgcagggaggagccactgcagtgtggactctaagcctcccagaggtaggagggtcccagcagttgtgaggggtctggggagggaggacaggacttagcaggggcctcttctctgaatactatggagctctcgcccagctgcccacactctcgcgcacctccccccacactcacaatgcacaaagagactcagagagatttgcagggagcccagaggatgctgagcacggcaggtgaaatctccttcttctgcagaccctacttgaggcagctccaggaccccggtattggagatgggggtggcgttcagggcggggaagccctggaaccagctcaggtgtgcaggggggttgccgtcagcatcacagagcagccgcagagcctggccctccaggacagggagggacgaggtgttttgcaggattttgaaggctttggggagagaggtgtagagagttagagatggggtataggggcaaagcactggtgtccctctcctcctgtggggtccacactagctctgaggaggagactagtaaagtgggggcctcaggtcttcagaaaagcccagaccatttccctggagctgcccaggctgtcctgcagagagtggagcaagggctgcggacagcgtcgtggcagacaagtgccattcctggaccatggagacgcctgaggcagtaggaaaacaagcaagagagaagagggagtgcgaggggtgtggcagctcctgccgaagaggcgacaaaggctgggggtgagcaaagattcagtccaggtctttgaagtctatggaggccttagtcctggcttctcatattgatccccgttagtccccactctgcttccatctggccctggagagaacaggactggctggttcctacctgcgctgtttccttggaagatgctgatggccactttctgtggagcatctggggtggaaagaggtggccgcctcaacatccctgaggagggatggtaggcatggggccttcccctcaggagccatgaaaacagggaaaggggctctcctctttggcaaccaggtccccaactttaagctctggctcagccctgccctgtccccccacaccctcagggacccgggcgtcctggcccagcactcacaggagacattgagctggatggttctctccatggtcacaccggctccagggaacgtcacctgacaggtgaggttggtgctgtggtcctggggccgtggggtgattgtgagcaccgaggactgggtggtcctggggcccagggaggtgggggcagctgacatccaggagaagatggggggcgtcccctgctcacagacccagggcacagagcaggtcagattgctgggatggccagactccagggtccctgggatggagatgttgggcctgtgggtcagggctggtgaggagatggggacgcaggatcaggatggaggtctgaggtttcacccagggggaagcccagtctctggtccagctccttctctgagcccaacatgcttaattgtacccgcctcccaagacggggctcccgtcccagccctgccctacggcccccatgaccttcccctgtggctagtcctggagctggttccttacccatcacacgcacagagagcttggaagatgtataaccgtatttcatccatttggacttcaaccgaaagaagtatgcagcattgtccctcctccgggcatctctgatgctcagggagcagttcttccttctgggatcccagaggaggtggaatcggccccgggtctcctcctgcacttcttcgtctgggtcgtttgtggccactggaacatcagccccttccaggaaccagtagccataaccatagtacgaggctggaagggtagtgggcaatctgcagggtacgaggacgcacagaccctcctgcaccgtcagtgactctggcccctccagctggaatctccgctcctgagccagggcccctatggagacatgagggtcagctcggcccagccccacggcacctctcccctggcccactcacctgcccacagcaggggcagcagcagcggtagcatctctgaggcggaggcttcctgggctccctgcatgagcagagaaggggaagggagtggaggggaaggactgcggggaggaacgggtggctggggaggagcgcgtgatctcggctgttcacagaagaggaactgcgaagccacaagccctcggagctccactccctctgcacagagcagacggaaactttgagacccagagacctgcccaaagaagagcagaggagaagagactgtgtcccgcctcccacctcggggcttcctgtgagcaacagagcccggaccagggcctcccggggcatctgaggaatgcgaaacctgtgtccaaggccctgcccacctgaggtgcttttctgtgcaccactgtttacacctgggagctggtcactcctggccccagagagtcacagcctcatcccacgccatgagaaagtcagtcctgcaggatataggattctgtagggtctgtgggagtgtctgggacagtgaaaggaagaagggtcccaggtgcagtgtgggtgatagccactcattcattcactcattcattcattcattcattcattcaccaaagacatagtgagcatctgtatgtaggtcgggctggagaagagatgccagggacctggtccctacccttgagatgatccccatccatagcttcccatcctcagcacacaccctcactatctagctttagagctgtggacactggtgagtttgccaagtgacacagtagaatgccagatattttttaaaacatgagtatggaggtttttccttgacagctagtacgctgatttacaaaatttcaatgacatctccaaaataagaaccatgcaacatcttcatgtaaatcaaaaaggacacatattttatgaactgcagtgcagaagaaacttcttttgaattaatgttgccactcagtgcagtgtggactggagagatttttttttaggtcctcatcatagagattagcaatttctttcctgtgaaaaatctgcttctcacagttaaatgtggcacaaaagacatatttctggacaacgtgagcagaatatcctgacaaaattaaaatttttaggtctagctcacatggttttctattttcctctgtgcagtatgcatctggcaaatctctaatacctatgaggtattagaatttgccaccatatatttgtaaatttttttatttctacaaacttaaggagtagatgtaaaatttttttgcatgtatataatgcgtaatgattatgtcaggatatttagagtgtccgtcacgtgagtgcaatacattcttgttaactaaaatcacactattctgctctctaacgctgaatttattccttttaactgtatgtttgtagcacttcactcacttctcttcatcttctgtcctcccccatctgaccctttccagtctctgttgtctatctttctactgtccacctccatgtgataatatttttttagctcccacatgtaagtgagaacatgcaacatttgtctttttgtgtctgacttatttcaatttagataatgaattctagtcccatccatgttgctgcaaatgacacgatttcattcttttttatggccaaatagcatgtatactatattttctttatccattcatctgttaattgacacttaggttggttccatatctctgatattgtgaatagtgcagcaaaaatcatgtgaatgcaggtatctctttgatgtatttctttctttcccttcgggtagatacccagtagtgggattgcttgagtgatcgaatagtaattctatttttagttcctgagaaatgtccatagtgttttcaaaagtggctgtactagtttaaattcccaccaacagtacagaagagttatctttctcctcatccttgccaaaatctgttattttttgtttttttagtaatagtcattctgactgggtaagacggtatctcattttggtttagatgtgcacttctctgatgattagtgacgctgaccattttgtcgtattggctgttcttatgtattctttgagaactgtctattcctgtcctttgcccactttttacttggattatttgctttttcctgttgagttgtttgagttccttgtatagtctggatattagtctcctgtcagaagaatagtttgcgaatattttctccaattcaacaggttgtttcttcactctaattatttcttttcctggcagaagctttttgtttattaagtcccatttgtttatttttgtttttgttgcctgtgcttttcagaacttagtcataatttctgactcttctgaccaatgttcaaaagagttttccctaggttttcttgtagctgttttttttttttatagttttgggtcttacatttaagtgtatgattcattttgagtttttttttaatatggtgagagagaagaatccagtttcattcttttgtgtgtgggtatacaattttcccagcaccatttattgaagaaggtgtcctttcctcaatataagttcttgtcagttttgttgacaatcaattggctgtatacatgtggccttatttctgggttatattccattggtctatgtatctatttctataccaatatcatgctgttttggttattatagccttgtaatatactttgaagtcaggtaaagtgataccaccagctttgttcttttttctccggatagctttggctattcaggttctttttggatccatatgaattttataattgttttttacaattctgtgaagactgacattggtattttcatatggattacattaaatctttagattgctatagaccagtgtgggcttcttaactatcttaattcttccagtcatgagtatgggatgtttttccatttgtttgtgtcatcttcaatttctttcatcagtgttttttagtttttcctgtatagattttcacctggtaggtcattaagagcatattgtttaatttccatacatttgtcttgtttccagagttcctcttggtgctgacttgttgttttgttccattgtggtctgagtatacattgagtaaatattgattttttttttaatttatagagacttatttcgtagccgaatatatggtgtatcctggagaatgtttcatgtactgatgaaaagaatatgtattctgcagttgttgggtagaagttctgtaaaagtctgttagttccatttggtctatagtgtagtttaaatgtgatgtttgtttgttgattttctgtctaagtgatctgtcttactgagaatagggtggtgaagcttcccaccattattgtattgcattctatctctctctttagatctagtaatatttgctttatagatatggctgctccattgctgggtgcatatatatttagaattgttatatcctcttgctgggttgatcccttcatcattatataatgaccttctttgtctttttctactgctcttgacctaaggtctgttttatctaagtatagttactgctgcttactattggtttccatttgtgtggaatatctttctccatccttttacttttggtctatatgtgtcttttcttaaggtgtgtttctttaagctgcacactgttgagtcatttttaaaatccattcagccattctatatcttttaagaggatactttaatccatttacatacatggttattattgatttgtgaggctttctttctgtcaggttattaaacattttcttgttttaaacattcgttgtttctttccttttatcttattgtttgtccttgtgatttggtggatttctgtagtggtaccatttgagtcctttctagttctcatttgcatgattgctttaccagtgaattttttactttcatatgttttcgtgatgataaaatcatccttttgcttccaggtttaggactcctttgagtattttttccaaggctggtctagtggtaataaatttcatcagcatttgtttgtcttgggatgaatctatttctcttttatttatgaagaatagtttctttgcatgttctgtggtggcagttattttttcttttagcacttagaatatatcagttccttcttttctggtgtgtaaggtttctactgagaaatctgctcttagtcaaatggaatttcctttagaggtagctagatgcttttctcttgctatttgtagaatttgctctttaactttgacttcacacagtctgactataatgtgccaaggagaagaccttttgcattggggatctgcccggggatcattgggccttctgtatctctatacctaaatcttttgttagacttgggatgttttcatgtattattttgctgagtaggttttccaatatttctttgttttttcacccttagagataccagtaatttataaattccattgctttttgttgtcctaaatgttattaaggctatgctcattattttttgtacttttccctttatttttgtctgactagattatttcaaaaaacctgtcttcaagttccaagattcttctgccagatttagtctattattgaacttttcaaatgtgttttgcatttccttcaattaactattcagttccagaatttatatttggttattttaaaaaatatatatctctttgatcattttctcatttataccctgaattgtttttctggtttccatagtattgattttcagaattctgttgtatctcactgagcttctttaacatcaatattttgaattctttgtctggaatttcaaaaatttctttgtgattaagatctatttctgcagaattcttgtgttcctttccttgctgtttcatgtttcctgtgtccttatgttaaaatctgtgcatctagtataacagtagcttcttcctattttttaatttactttcatagaggacatttcttttttttttcatggtccaagcatgtggtgatttttattaagaataactttggttctaagaattccactctcaattctttaatgctttctgttaaaaacaattatacaacggcaaatacaaaaaatattaaattatgaaaaccaatccattaaggctccctttatatataatatacactcaaacaagtcaagatttttcagagtagaagaataaaatcaactgttatagcttagaaagcaacactactactatgagactataaaacattgaactactttaagaaaatcacaatgtggaaaaatggagcctttttttttatcaaaaagtggctcaaagcacaaaactgctcagatgttcaagggtcccaggggtttgggctgcacagtgttaaggggagagaggagactgacagcctgtttgaatcaggcttgtgagcccagcccatctgacaatttcaaagagcttctctgcctaaacattccaccgtttagtataagacaccactttacgctatttacaagtctccttttggccagcctttgtattattaattacaaataattctgcagatttgagtgagattaggaaagaaatgctttcttaattaactttttttttcagtgaacaattaattctagttaagctctaggaacagaattggtccttataaaggagcctatcagggcccttgagaatacgatcaagtggcagaattgctttgagaatacggatttcaagatctgacatctagttagataaaaagatatgagccagtcccgaatagaagacatttcttgaaaatgtatctacgttgcttgtttggtggggtgctttggctttgattctgtgtatgtgcagtagtgtactttctgtatatttctttgactgtaaacagcattagtgatatgtgtgatttctttggctagttggagcatggttattagtggagaatatggtaaagttgtgctagggacagggatgctgagcgggagagtcttcaggtccccagctttggcatcagtgggctgagcatctatctttttgccccagggtggtatatgctggcttctctgttggcagttaccagtgggttgattcttgggctttcaggttgctcatttggatgctcatagtagcaccaatggatcaagcaattgtgtgggttttcaggcccctgggcagccagcatggcattgacaatagcaatagcatgggcaagatgattctatgagtcccaagtgatgtgcattaatgttggtgctggctgcaatgggctggacaagacagcctttggacccacagttggcacttgcaggtaggcgccaggcaaggtagtagcagccagaagtttagatccaacctcaagcccccagaagaagtgctcaggtgcccaaggtagtgaattgggtcgagcaatccgcaggaccctgggctatgtgctctgtctcagagcgggagaggtgaggtgaagctgagctagatgggtttgtgctcaggtcctcaatgttgacagcaggcactcgtcattgtgggcagggtcagagcaatcgtcgggtcccaggcagaggattactgaagagggtagggccatcttgagtggtcatagcctgggtcagttgaaggtggcggaagaacatatgtccctttcacactccagtcctggaggggctcgacaccccccctcaccctggttgctggagctcccatctggcttgcaaacaagttccaatggcaatttgtgcccctcttgcatccttgtctcagatcctggcagtgcttgcttcacagccacagctgaccaaaccttgctcactttctagccccacctgcaggagcactcctggttcgatctcctgtcccagcagcaatagcttgagtttctgtaatgccccagtttcagtgtctctgggtccttgaacagcatacaatttccagaggacaagcttgaaaatgcttaagtgtcagaaaggtgtggaacccagcaggagttcccttcccggagtagttctgtccaatggtgtcctgactctctatgttagtttcatagggttgagtgcttctcccttggccaggattgctgaattccgccatggagatgtggatgactggaaatccctaactcagtcctttgtgcatgggaagtcactcccagctcccagccaatcccagccagggaggctgcctcttttccttctccttccctgtttttgatgtcctctgccacttctctggtggattccaggattttcccttggataatgtaattcgactgtgactgtctatacattactctggttcttctaagtggaggaggcaggcatgaaatgcttctagttagtcgtcttgaactacactacccttatttgaacaatttttaaacacagtagtatctagataaatattcattcatccttactaaaataagagagctagttttacctttatttgatatataagtaattgagccaccaataagtataatacctgtcctagattatcttttaagtaaaaatgtggcacataatagaaaattcaacgaaatttgttttaatagtaaataaagttatatcatgctcatagactggaaggttaaatatgaagttgtgatttctcattatgtttctttaatgaactttattaggtataattttatagtttaatttggaatttattttgcctaaaagagttccagtgagagaaacattttgacataacagtgaaaacaaaatccctcataccttaaaattaaaatttttggatatttgtaccataagcttgcccggcctgtaagaagcatcatttctactagagatttctcaccaagaataaattaggtcattttcatgaggaaaacaaacaaaactcttagtcataactttgatccatgttcaatctcctcaacaaagttttgtgtgcattatctctgtactagagatgtgaatttttaaaattagcaacacatatttttaatatacctaaagatatttccttattccttccaataattatcaataaaaggaaaggcaggtatacgtattattattattagatctatcagcttaattttaatttctaacttatatctttatctaaattgctcagtttaataaaaataatttaatgggttaagacactgccttcaactgggttttagtttagagcaggagacagaccctacgtgaatatttaacgttgcatctgggcactttttctgacctatgccagtttgccaaccagtgtttgtccaacatacaaagataggctgcatatactcagaaactgaattactgagatttcaacaatatacaaaagtcatttcatatgctcaaactttccatttattctcttatttaaggaaaagtgtgcattgttaacagaaaaacaggttcttgtgccagcaggctagtaaatctcataatttcattaaaaacactttgggtcactttgtacactattaatgggactgtacgttagcacagccattatggaaagcaggaggtttgtcctcccaaaattaaaaatggaactaccatatgatccagaaatcccatttatgggtatctattgaaagaaaacaaaagagacatttgtactcccatgtttaccaaagtactatccacaatagtcaagatatggaatcaacctaagtgtccatcaatgggtgaatggataaagaaaatgtggcatgtatacgcaagagaatattattcagctttgaaaagaaagaaaattttgtcacttgcaacaacatggatgaacctggaggacaatatgccaagtgaaataagccaggcacggaaaggcaaatacttcgattctgcttatatgaggaatctgtagaagtcaatttcataaaagcagaggctagaaccctggtgatcaggggtggaggttggagacaatgaagagatgttagtcagagggtaccaagtttcaggtagacaagaggaatctggaaatctcctgtactgcatggtgactatagctaataatactgtatcatatatttcaatactgctaagatagtaaatttccaatgttctcatcacaaaacaaaacaaatattgctggatacaaagcaatccttttgatgagtataaggtgttactttaaagtgcaaaggggttgataagtgtgagatggcaatgcatatattagcttatttcttcattacacaatgtacacatattttaaagcattatgttacatatcataaatatacacaattttatttgtctattaaaatagaataatgataaaacacaaaggaaatgtccacaaaacatcacattgtatgctgtaaataaatacaatatttatttttaattacacctcaataaggctggaaatattgctttgaaaaatccaaaggcaccaggcacgatggcgggtacctgctgttcccactattcaagaggcggctgtgaaggaggatagcttgagcccaggaattccaggctacagtgggctatgacaatcatacctatgaaaagccaccacactcccacctgggcaacaaagtaagaaccttctaaaaaatataataaacaaataaaattttaaaactccagatggaatccaaataaatttttggaattaataaacaaaaaaacctgccgttgcaaagatcatgagtgacaaaggtgcccacttctccgtctgtcctcacccctgtctctcctcatctgtggtcatcactttactccagctgtgcattgaaacatctccatcctggacccctctcctgagctccagacatttgcattcagctgtctccctcctatccccattcagatgtcagggggattctcagaattatcatcgcccctgaaagccacccgtctgcagtcctccatggacacagctctttccttccaggtgctcagaggaacattctggccccatccttgctcttcccttcccctccctgacaacactcattagaaaattctgtgagcctgaccttccactcacatccaaaaacacatccttaccccatcctgcctccctggctcagccccatgcctcctcctggatgacccagcagcaccttcccagcctccttggctgccgtgacacacgcggttctgctctgaccagagcagctgagggtcctgttagagtgagagtccagtcaagcctctgctctctccaaaggctccaggttcctgcgtagcctcagggccccacgcaggctgccctgtcatccccgctgctccctcctctgcctccttctgctctcagactggggctctggctgtgtctgcaatgcccaggcctgctgctgcctctgagcaatgcactcactgctccccttccctcttgctgggatgcttgtctctcattcagacacagagcctccctgctcagcaccttcatgcctttgctcacacaccacctcccctcattatcagataagaaacggttccccagtctatcttatgtttctttccctgcatgctttttctccaaacacagatctccaccccacatgctcttattttatttattatttcttttcatttgtacttttcctgtctctagaatgatagcttcttgaagacagagatttttttcgtgctgtgtctactgatgaacccctggtgccaataataatgctgacacataatggatgctcagtagagtcactgaagttagtcgcttcgtgtctatcaccaataatgcctctgctccactcagaaccaaataagaattacacacacacacatacacacacacatgcacacaacacacacacaaccctgagtgacattaagactgagcctgaaggacaattgggacctagattggcaggaatgggagggaagggcatttcaggagaaggaattacacacgcaaagtctcagagccacagagggcttggcctgcagagactttgggtggagagtctggccaggaacagactgtgcaaggcctccattccaggctgtggcattttccccttgttctccagcaccagagaggaaacacggctgctcagactgtggaggaactggatgaggaggcatctggaaacggagtctggagtctgtgttgggagagatggaggcaggaggtgaggagggctcagtgttcagggaggaggcgaggccccaggcatgaccagggccaagatggagaaaagggccccaggatgaaccctgcttagaaggagggacaagaattagtgatttgtgggatctggaggagggagggaggtgaaggtgaagacccatatcctggttctgactttagagatgggagccactatgtcatcagtaggatggggatcccaggagaagtgggttgggggaagaagatgggcagctcaacttaagccatactgagcagagcaatcctggaggccattgagggggaggtgtccagtgggatgttgaggatgagatgcccacaacccctgagagattagcccgtgacagggtctgcagcctccacgcctgctgctgcccttccttcctgcagaaactgacagtgagtaaaaagacaaaggcctgccagtgtggccggatcggggtgcagagggcagcagactcatctccccgtgccctgctaaggggcaggaggggactggggtggagagagcaggcctagcccccagaacctccctaatgagagcaggaacctcccagcccggacattcagtgaaagccgaggtcagacaacaattggtccatgtggaattctcgccacaattcagcctactgcctggccctcttgagccttcagattcctccagcactgggacctgggattcagcaccatgtcccctgtactccccacatctctccttggtccctggggcagcgctcagctgaggaagaggaagcagaggcagataggcaggatcttcacagccgcctccccgacagccaccaagaccacctccaccacaggccctgatttcaaaaagttttgccccggctgggagcagtggctcacacctgtatcccagcactttgggatgctgaggtgggcagatcacttgaggccaggagttcaagaccagcttggccaacatagcaaaaccctgtctctactaaaaatacaaaagaaattacctgggtgtggtggcacatgcctgtaatcccagctgctagggaggctgaggcacaagaattgcttgaacctgggaggcagaggttgcagtgagccaagatcacaccactgcagtccagcctgggcaacagagtgagactctatctcaaaaaataaaaaaaaaagttttgccccacaatgggtaggtgaatacatacacttttacccctccctgttgcgcgtgtaaccttgttcaccttcatgggttctccatggccatattttttcaaaattagaaagaacatatgacccaactattttgcatttaagaactgatttcacaggcatagatgtacacttgtggcagtagatacaagattatttattgcagtgttactgttggtaagataaaattagtgccatgatattccattaggcacaaaatcagagtccacatttttgatgccacgaaattggagtccatccacacagtggaatcacccacagtactggaggagagtaatgtcactctgatgtcactactgatgttaaaccatcactgagatccttcgggcaagcaaatcaaggcgcagcgcagccaggacagacactggcggattctggggaaggggacgggtgtctgagggtagattctactgtgcactctgaattctcacccatgtgactatatcatctgttcagaagaacttagatcaggactactggggagaataagaagatgagggaagaggagtattcagcaggtggggactcaaagcctggatctgctatgtgaatggcaccctgcccttgttatggggccagtgggagttgtgtgtggaagaggccaaggggagtgaggggaggatggggacaggtgctcaggtggccttggagactaacgatggggaagacctctgtttcacttacaagagggtctcaggttacgaagttgagtccaggaagaagcagtagcccagccctgccccaagctgcaggccctgctccctcagccccagggagggggctctgtcctacctgtgccgtctcctagagagacaccaatccttgggttccttagagcatctagaacaggaagagagaatttccctttctttggggtggagatgaggtaaaagtaggtactcctcccctaccccagaagccacaggaatgtcaaaagacagagcttgtgtccttctagttcccctgctcagccaggcctccaggacatagccacaaagtgtcccctgccctgaccctcctctaccccctacaccctcaggaacccaggcatcctggccccagcactcacaggagacactgagctggatggttctctctgtagtcacaccagctccagggaacttcacctgccaggtgaggttggtgctgtggtcctggggccatggggtgatcgtgagcactgaggagccgaaggtcctggagcccagatgcaacagggagacccccattcagaagaatgtggagggggctcctcccattcacaggcccagaacacatagcaggtaaggttcctggtgtgactggtaccccagaatccctgggatgaaaatgttgggcttgtgggtcagggctggtgaggagagagaggagcttggggaccctctgagtgttatcagcccaccccagggtcctttcacgctgtcggcatgccaccacctctagaaggagcagaaccttcattgctttatttctggtgtctgggcttttaacatacttgtcatattccaagagagcatcctacaagatatgaatgtttcctgaatggtttctcctttctgaagagtccgtgtgggctgggcgcagtggcttatccctgcaatcccagcactttgggaggccgaggcgggcagatcatgaggtcaagagattgagactatcctggccaacatggtgaaaccctgtcgctactaaaaatacaaaaattagcagggcatggtgacgggtgcctataatcccagctgcttgggaggctgaggcaggagaatctcttgaacccgggagacggaggttgcagtgagccaagattgtgcaactgcactccagcctggtgataaagtgagactccatcccaaaaaaaaaaaaaaaaaaagaaaagaaaagaaaaaaagagtccccgtgtgtgcctctgatgctcagggagaagttgctggtcttgaggtccctgggcaggaggaattggtcctgggtcctgccatgaagcatttgtcctggtcactggaggattgtggtctacatccacccctttctggaaccagcacaggtggagggttccatagtaagtccaggagtagggaaatttctgcagcctgaggacacacaggcccttctgcaccatcacaggttcctggaactgcagctgttccagaacctaagccaggagccctggagtgaggaaaagactaagccttgggctctggagcctcctgagtgggggctgctgtccccgcagcctatgcagggtcagcagcagtggcatctctgcctcatacccaggggcagacctctctgaaagggaagggaaagctacaggtgtgggacagcagaggaagcttgtggtgagaacaagaggtgaccagcccagtaaagggaacttcagacacacaatgagtccattgtaattaactctttaagaaaactgagttccatttctgcatgttgctcagacaaggcaagaggcttgccctaagtaaggcagcaacgaaggaccggagtccccaagtcctgcctcctggacttgtgcacaagtgactggagaaacaggtgccacctggccagttccccatgaatcacaggcgtgggacccccacagaggtcagtctcctagagatcagcaccagaggcatgaaagggtccacgtgaggtaagagcagcaacacttcattcattccatgtgtgcattcattctcaaacaaaagtaaaagagacagatttgcatcattcctgacgctcaactaactcaagtagtcctggaagacagaaacaatgatgggcttgagctttctccaaggacaatagggagtcatggaaggttctcatgcagaaaagggtcaccataatatatacatgtcagatagatccctccaaggccagactgcaggctaagggcctagagagaaagctgttgcgattgttcggtaaggaagaaccatgccttcaaggagagagtaatgtagtgaattcttagaattgcatgcgacctcagtgtccttttgaaataccagaagcggggctcagtcatccttaacaacttccagttctaaaccacactcaaatggctcaagctggtggccagagataagaacttagacaggcacagtgactcatgcccttcaaccaaccccagcactttgggaggctgagcgggtcgatctcttgagtggagttcaagacagcctgggtaatatagagggacctcatctctacaaaaaacaataggtaaataaaagaaccagcggcatctctcctgtaaaagcagacttgccttcctgctttttctgctgctacctttaagggaaccacagatatttacccatgaacttaaagtaaccacacccgattccctgagaggtactgccagttgccgtgtgcttttctttctcactctgcctgactcctcattcctgactcgggtgacccagggatggactgggtccccccactaattactgccccccctccactcattacaccctcattgcctggagtttataagtaaaaatctttaaacatatttcctagcttgatggtgcattgaacttgcaccctccacctgaagaactgtggctactctaggctgggtttccccccaggacacctgggagggtacaagggtggacttccagtgccagggaaatggtcaggcaggcataaagtgaacacgggtcagaaaagaaccacaggggcatctgtagcttaaacaagttgcccatgtgaggcacccatggtcatgggtcagacaaccaggcattagatcatcctccacgtaagagaaagatcctgtgaaatgtacgctgtagacaccacgtccagctctccttcatttcccattagggcagggtcatcagccactctggcactgaagccccagtttagctggggactctcaaaacaagtcaccttggtgattgaagaaagaagcaatttgagacattttcagaaagtggactttgcagggttggtggtggtgcatgacagagcaggagcaccatcatctcagactaacactgccactttaagttccagctccctttctagcctcgtgcatttcaaggaaatcacttatcttctgacaacaagcagccggaaagagcagacagtgaaacacagataagacagctcaggcataaagggatgtctgagggggaaaagtctcctgggtaaccaccaaacttcacactcatacaatgggccccagtaaaacagtgggccctaataaacacattccttcccctttaggtacactaagatagggaagctaaaagcagactcagggggtatgcctgcagctgcaggaagacgtatgggattagacacaaaactctccctcccaggtaagcaagacaaagagacacagaaacattctgagcctgtgataagctgtaccgccctgaatccttaaaaactcttagtcggtaaaagagagtgcctctgacctaactcagccagaagcccttctcaggtttagtctccaaaataaacctatctttaactgttcagctgttttttgtgtttccttcttctttctttaattcttataatgcgtgagagaggggagcatctgcagtggctcccagagccccgactcaagcagcagggacttgggggtgtcatggcagagagctggtgagatgaaccgtcagggcttgggggcaggtctgggctggagagggaggggtagggagtttcacaaagcctactggggttgtactcaggggaggtggatgtgttcaccaaggggaaacagaaggccccagtgggaggggtggggaacacacaatcttaagcttaattgtgggctggggaatggctgagatggcctggccagggaggtaggaggagaaggagctgcacattggtgacagcagtggtgagaattttatcagggatgggtgggaggggcagactgcagggggcagcggggtgagggggagtgggactcattgggatgtcttcagtcctctcctgtcggagctctgggcctccacttctgtcctgagcaagcagcaagcccaccttcatcacgaccccagagggaaggtttttttcctacctgtaccatttccttgggtggggccaatagccagattctgtggagaatctggcatctggcatctggaatggagaaagccaccattttctaccaccatgcggaggagtatggctgctctgcctctttggctaaatccatggaaagctgctgaggtggggactgctgtgatttctcctcccttctccagtcgagctcctgaccaggcgttgaatctctcaggccctgaacccttcctgtccatcctggcagccctcagccacccaggtgtcctggccaacatccaagggggatgctgagcctggtggtatgaggagctcagctgggctgtgagagagagctgtgcttcaaggtggcaggatcaccgattaaagcaacaatagaccaaactgaaagaatgaatcaagcctttaatcacagacagcagtgatagaggcaagagtctaaaccagagaatgcaccaactcttcttgtttcatttcctgccacccctctggaacagtgcacactgctggagggtcaggtggctcatggatcaacacagacataggggtcggggtcctctcactgaggagggagccctgaacaaaaggctcaggcagttccacagaccctgggaagggtgggggcatgagaagggctaggagtggaaaagaactgagtactgagtcagagtggggaaacgtgtcttcaaggttcctcctcctgccccccgcaaggtggtctcagcagaggcatctgtggaagacctctgtccaaggcctcagaaaacgaggcctagaaataaatgtaactgggatagaaatgcaaatatgcatagcgcatgactggccagaaaggtggggtccttgaccacaaccgagtgtgaagagggtggagtctcccagtgaggcctgccaggaaaagcctttgcaactgcctgtgatcgaacctgaaaagccacacctaggtttttaaccatgtgctggactcctcagatagttctacccatggatctaccgcttcctaggaaggtcacctggcatggaggcctgatgccacaatcttggaccctaggatacaggggtacactgaggacttgaagcgggggcttcagaaccccaggaagagaggtgcatcttccttcacaagcccctggcatggtgctgtttagactccaagatggctggctttaagcttaaagggatataaattatgggtatctgatacaagctacagaggaggagaaactcagaggggagaccccagagtgtcagcctggggttggcctcccctgccctcagccccaggatcctgcacctctcccttactctccagataagaaacaggtatgttcctgcctctggggctctctcctggggacccttctctactggtcacagtcagaggcagtgtcattcattgggagctatatttcatgtgatatctctgacctagagatgtgttcctactttcctgcatctggaacatctgatgctctgagagcaactgtgggtccttgggtctctgaggaggttagctttgccccaggtcctctcttccaggtttttcttttcttttcttttctttctttcttttttttttttttttttttttttttgagatggagtctcgctctgtcacccaggctggggtgcagtggcacaatctcggctcactgcaacttccacctcccaggttcaagcgattctcctgccttggcctccctagtagctgggattacaggcacctgcctctacacctggctaatttttgtatttttagtagagatggagtttcaccatgttggccaggctggtctagaactgctgacctcaggtgatccacccacctcggcctcccaaagtgctaggattacaggcatgagccactgcgcccagccttcttccaagttttgacagggcttatttgtggccacagggggattatggtgtctgtgggccccctctgggatccaaaggtgggtgtggactggattaaagtcagtccagaaaacccatggattggactggagaatgaagctgggcacagaatgcaaaggttccctcttcaccgtcactgactgaaaggtgagagcacagccggctgattctcatgggactgctgccgggaagcaagctgtggctgcagcccgactgagcaacctcttcctcaggcctctgctgccctcacagctggggcaatggcagcagcggaaaaggatgttctacattccgctgacaccatctgatttgttgggagccgaaaaggccaaagagatcgtgaccaactcagcattccactggaggctatatgatcaaacagcaaactgtttatcatgaatacaggatgtgagcaaactcacgactgcacctgccgccagaaggtttgctgagggcggtcactccctggcgccggctccttgaagttatcttctgggacatctagggcctactgttcaaggaatacagtcttgcaagcctactctagatggagcagctgacctcttcttccacccctccttctcgctatctcttttgcctaataaatatggagggctgtgtaaagttcagggcccttgtccactagaggcaaggtgccccctgaccccttcttccaaacacattcttttgttctcttgtctttgttcccgcgttcgtccccctttgttcagtcccccaaggtccgtgcagtttacaagcggtgccccgaacagtgacaggattgggcagtctacaagtagcaccccaaacagtgagagaactaggctgtcttcactgattagcctctcccacttggaagtgggcacaaccttggagtgatagattctcttcctggattgaatgtattgttcctctcccaaatttctgccttcagcaaacgctacttttgccctcagaccactacaggggaaatgaaagctgagctctcctctcccctgaccacagcagggtgggaccttccttcctcctcttcctcaccacctgaagaccaacccccacttccctcaagagagatgtggagtttctgggtctgttttccccagttgcttttcttggagccccttgcatagggtcataggagagtgagactgagactctcctaaaatggaaccctctctgtcctcagctccagccgtggctccagctctggctccagacttaggtgagctctttgggttcagggtgaggcagaaagaacttgtcctgtgtctctcctcctactctcacttcctgtgggccctgcctgcacatatacatacacagtctcttcactttgacttttccacagttttccagcctctacaactcctcccctctgtggagtgaccagcaaatattcctctcctggcctctctctctcttgaaatgaatagcctgctaggtctcccatggacagctccccatctctgagctcacgggactcttttttcaatctaagtaagatcccttgtgtgcctaaacactttgaatgtcttccatcacttccaaagaccatgcttccatcagctgcctgatattctgttcctccatttagcctacagatcctgaagcatatatacataatatatatattatatatatgatatatgacatatatatatatatgtaatcttttaggattgggcacaaagctaaagactgaaaaggaccatgagtcttgttctttgtcctccagagctccaattgggtacgagtaccagtcggaggtggtacagaggtgagaggagtagggaagaagagggagaggggaagagacacagattgagacagagagagagagagggagagagaaaaagagagaagaggaagagagggagaggggaaagagatagagaaagagagagacagacagacagagagagagagagagagaaagttttccttcaacaggaacattccctttgccctcagacaaggcaaagggggaaagaaagagactagaaacagactgagacagaaagaaaggtagagaggcaggaaaaagggagacagggagagaaagacagaagaggggaaaggggaagaaggtgaaaagagacatagactgagatagacgaagaagcagggaagagagagagaaaggggtaggagagagggagagagacagagaaagatgagcaggaggaagaggagggggggaggagaaggaggaggaggagggggaggggaggaagaggagggggaggagaaggaggaggagggagagggggaggcgaagggagtttatcacaattagacagggattcctgaaggccccgggggtggagtctgtcctaagaggcaagaaaccagggatatgtgcagattccctctctgagtgatctaagggcccatctcctgggcgtgaccgagagcccgagaagggcagacacagactgggaggttttcctatcctgcgccgttctctcccatgtctaccatcagggaccgcgcaaagaggctggtggctctcgctgcacatccagacacgttttggtcctggcgagccacaggcatcagggagagtggcgctgtccctggtgctgaagcaggactgtgtccctggtttaggaatgactgggctatgcagaggagtctgactagataggatccagatcggggtctccagccggcaaaacagctgagtcacaggattgggccgcccaagagggaggaagttaaggaggggccgactgtgggtctgtatgggctggacttccctctgtgcccctcccggctccttctttaccccaggaatgttttgggtcaaagccagcagcagctcatctgtagacctcttgttgcatgaaaaaaaaatcttatttgttaaagcccctgaaaatcaacagactcacagtaaagtgcatttctcgttgatacaatacggaggggtgaagattaccccaattccatttgaagccaacaggatattttccaaaagtgccatactcctttaaatctcctgaccatgcatgacagtgcccaatatgacagactttttttcacttttggtaattcaagattagataaataatataatctcccttccttacttttcaaagatgtgattataaacagccttgttgacccaatttttaaattaatctctgtgaattatttatttaaagagtttatgcagaggggctttggggttttccttaacaatgtgtctaagctttttgtgaagatattagtcttctcctattatttaccttggagaataatacaatttttttaaccgacaaaatatgcatccctaaatatcaaagtttaggttttactgtttttggcatttatgtaaattgcatcatattgtatgcatttttcctagctacttcacacaataatagcttaagaattttttactgtcatgcagaagggatgcaaatcattaagtgtacagcttaatgatttatcacacagcgagcacattcagctcacaaaataggtattgccagctctgaaaatgcctcaacaaactgcactcccaccatcagaacacaaaggtcccgatttactcatatctttgccacactcgctgttatttgccttcttgattttctgaaagagtgtaaagaagtatctcatttctgtttaatttgattttttttcagctaccagtgaggctgcgcatctcaacgtggacttgttttccactcatgcttccatactagcagattaatattcatgtgctttgcatacttttactttggcttgttttcctttttctcattggtttgtgggagtttcttacacattctagttcaaaagtccttgtgagctttaggtgaaacaaatgatttctctcattctgtcatttctcaatgaaagtagtctgatttgtccttgatttgatggaaaaccagagtttggatgcaaccaaatgtgtcctacaaattggtcttttttttttttttcctggttggttaaactcagaattttcgagctttaacacccctatcccaattaccccaaatcacctcagcttccctcaggctttacataggaactggtggcgacatcagtgaaggcctctctgggcaacttccggttcacattggcgtccaggcgtgatttcttcagcatgtccattgacgcgcatgttcaatatcacttttggagctatgctctgcagatagttatcatggtgtaacgcggtggagggcgtgtccgttatttccattgtaaacttttcttcagcggctttgtcaggagaacaacatggtcgtgcccagatagagttggtcactggaggacgccatcttcaaaagatggtcgttccatacagccagggaaggccttggggtctcacacagcaaggtcttggagctgtgccatactggcagggaccctgttgtgtatatatctacgcagatatgtgtatgactgacattacatattctgaaaaataactcttttatatttttacacttatttgaagggtttttttcccccttctactaaagaattcaatgtcttcttgaaaattaacaaactgcatgtgcttaggtttacttctgggctctctagtctgttccattggtctaactggtccatatgtcatttggaatatagctagcaccatacggctttgattactgtagctttgtaatgtaatttgaaatcaggaatgtgattcctccaactttgtttttcttgcttaaaattgtttggctattcagagtcttttgcaattccataagaatttggcaattatttttttctgtgaacaatgccattggaattttgatagagattacactaaatccgtatatcactttgggtagtatggatattttaacaatattaattcttctaatccacaaacatggatatttttcatttatttgtgtcttcttcaatttcttccattaatattttgtagtttttcactgtacagatctttcacttctttggttaaaatttattcctaagtattttattctttttggtgctattacaagtgggattactttcttgatttcctttttggatggattattcttggtgtaaagaaatgcaactggtttttgtatgttgattttgcatcctattactttgtggaattcatttattcattctaatagttttgtggggttgttaggattttaagacacaatgtcaaaagggtaatctcttcaataaatagtgttggaaaaagtggatatccacaagcaaaaaaatgaaactggactctctcatcttacatcctacgcaaatatcaactgaaaatggagtaaagatctaaacatgagaccagaaatagtaagactcctacaagaaaacatgggggcaaatctacctgatattgacattgatgataattttttggatattacaccaaaagttcaggtagcaagagcaaaactaaacaagtgagattgcctgaaactaaacagcttctgcacatcaaaggagacaatcaacaaaatgaacatgcagctgataggttgggagaaaatatttgcaaaccaaatatctgataaaaagttgatatccaaaatatatgaagaatgtatacaacctaatagcaaacaaacaaacaaacaaacaaaaacccaacttcaaattgggcaagggacttgaattgacacttttctgtagagacatgaaaatgaccaacaggtatatgaaaagctgctcaatatgaatggacaaaactacaatgagatactgcctcacacttattagaatggctgttcacaaaaagataaaagacaacaagtgtgttgtgtagggtggggagaaaatggaatgcttgtgccctgttggtggaaatgtacattgatacaattgttatggacaagagtttggagactcctcaaagagttaaagggaactcaatatgacccaaaaatctctctgttgggtatataccttaaggaaatgaaatcagcatctcgtagagatacctgcacccccatgttcattgcagcatgattcacaatagctaagatatggaacaacctaaactcctatcaacagatgaacggataaacaaatcactgtgtgtgtacgtgtgcacacacacacacacaatgaaatgctactagccttaaaaataaggagatgctgccattagccacagcatggataaaactgaaggacattttgctaagtgaaataaaccagacacagaaagaaaaattctgcacgatctcacttacatgtagaataacaaggaaaggtgaatacatagaaacagagtagaatggggcagggagtgggaggagatggggagaatgttagagggtacaaacttatagttatgaaggataaagaagtctagagataaaatgtacagtatggagaataaagttaataatattgtatactcaaattttgctaagtgagtagcttttaggtgctcttaccacagaaataagtaagtatggacggtgatggatatgttaatttgcttgactgtattaatcatttcactgtgtacatgtctatctgaatatcacgttgtacatattaaatatatacaatgaaaataaattttaaaaattaaaataaagaaaaataaatgaaaaccaaatactgcatgttctcacttataagtaagatctaaatgatgagaactcatgcacacaaagaggggaacagatatgaggatctagttgaggatggaaggtgagaggagggaaaggagcagaaaaaataactattgggtactaggcttagtacctgagtgatgaaatgatctgtacaaccacctcgtgacataagtttacctatgtaacaaacctgaacatgtacctccgaacctaaaataaacgttaaaaaagagaggaggtgggggagaaaagaaacttaaaaaataaaatttaaaccaaagttccagcatcattgattaagtaatttatcctttcccacagacctgttgtgctggctaggttcaccttttccccagtgatcttctacttgccctcacacatgttagaattctatactatatcagcctcttggcttccattggctgttcacacccactggtattttattatttatattgctttataataacctttgatatatagtaggacaagcctcaccattttactcttctccttcaaagtgtcttattcttagtctgcactttcacatgttccattcctctctaccctaaatgggattttgaatgaaagggtattgaaattattgattcgtaaatgattggcatctttatgtaactgggacgttctattcattaatacagcatatggatcaatttatttaggtgtttgatatcttccaacacagttttataaagtgctacatttagatgtaacacatctcttatagttccttatttttgttaatacttcaagtggtatctttttattacattttctatcaacagttactggtatataatgatacaattattaaatatatctgtattcattcgtttgctaaagtttctgttataatttgtttttacattattttggaattttccatatagaattgtatattatctttaaaaaataaaatagaattggcaaaactgaaaagtgactgtcaagaagaaaatctctcttccaaattatattttaaaataattcatcctctcccatagtgttctaaaaaaattttatctttggtatccttgcacagtttctctgtatacctggatgaacccattgatgaaattatccattaagagacaaactgtgagataatttaggaatcctgcaatattttatttaaagggaggtgaataaagaaaatgcagtcaagttaatggagaaaacacaattactcaggactacacccagccagcctaaagggacagaattttcaggatgagatttttcagtcatcaaataggcagaagtatatctaagattgtgggcaatggtggccataaagtaaacaactgggctggttatggggaaatagaaaggtgggaacacaaaagtgtggatctgagacgaactccttcttcatgataaaataaaagcttttaatgctcataggaagtacaaaagttagattggaattggaaggagcaggaatatcccacaaaataacactgaaataagtttgacctacaaattcctgattgcacaagtaaacatgtttaagactaagagagaatgatgatgcttaggaaatggaccaggaatgaaaaagtctggggtaaaatcccaaggctggtaagagggttacattcattgagtagaatccccacccacctatttattaacccatccatccatccatccatccatccatccatccatccatctgtgtgtccgtgtttccatttatccatccattcatgtgtccatatgtatcagttaaagtccaattactaaaaaagaaatcacataaatatttaaaacagaggacatttaatggcagaaattgattacgcagttgatgttagggatgaaaaattaaacagaggacaatcaggcaacctagaaatgaacaacagcaggaaaccaccaccacttctaggctagaggacagagggaaagggcagtgcaccagagcccagtaatcaggggcacccagaggctgagtgctgagcactccgagtctgagtgctggaggctcagagagggtgctgccactaccaaagagattgcacaattcagagagaagggaaaaaataaatgctgctgcttctccattttcttcctgtattttaatctccagcattagcctctcattatctgaacctagttggaagctggctaataaagatgcctgataaatgtggtctggcagaggaagtatctggagtacatagcaatgtagaggaggtgcaaggaaaggttctgagagcagagcagtcatggacggtccatccaaccatcaactatccagccagccactcatccatccatccaatcattcattcatccatccatccatccatccatccatccatccatccatccatccatctcgcccagcagtacagttcaggagataggatatgaaactggacagagattatttctggatgaaccaagtcagcaagtgattcaagatgcagagaggtgggctttagtaagagatacaggggctctgttcctctggacttcaatgtccatcttctcaccatgtccagaggagagagatcagttcagtccactctcccagccatgcttctctgggaccctctgatcctgtgagaaaatgtaagaggaggttagcagttagggctgcagagagctcaccctgaggaagacagaccaggccacttttccttggaatttgggggctcagagactgggtcatctgagcaaggcactgctcacctagtgcagcagatccaggtgaatccacagatgaatgtgcagctggtccccatgaggattcccctaatcagtgtgaaacccagggtctgtaaaacgccttcttctatagagataacggagtcacctgaaggggaggagaggaataaagtgtttctcctagacctcatcccactcacagtcccatcctagaatccaggtgccctgtccattcttcccaccaatgactcactctgcacagagaggctaatggagacatgctgggagcccaaagggtgctgagcttggcagacaaattcccctccatcacaagactccactgggggcagctccaggacggctgattctgacgactgggagagattcagggcttggccttcccaggtccagctcagcctggcaggtgggttgctgtcagtcacataaacaaaacgcagggattggttcttcaggactgacagggaggtggcattctccaaggctacaggtgctgggaatagaggggagaagagaaactcagcaagagagataccaagagaggcacatgcaggccttgggttcagatgtacagaggggtcccccttccccttcatgatgcagtttggtctcttccccttctccgttattctgttagtttagatgcagactccgtgaggtacaggaatagaggaaaggactttgtccttgatgagaatcccagtcaagatctcctggccaccccctagttcccacaccctctttcctgctatctttaccaacatctccagttaccctaaagtctaatcatttatttattcaatctgcagccctttactgatccttgtttaaatgaggtactactgagagggtatcagctcctgagggtgtcacagtctaatggttataagaggcccaggactagatcttcactctgcaatatgacaggtgatgtgatggagtgactcaggtgaaggagggtgagcaacacaataagacagaaagtcagggaggtctccctggaggaggaggggcttaagaagagtgagatggacaagtggaaacagacagtggacaatattggagcagaagaccatgctgggagaaaggaagagcagtgcaaagacaactatgactagaaatggccttggagtttcagggaatggaaattaatcctgtaagggaagaggatagaaatgtgcataatcatgtggagaacagggtgaaaagaggaacctttggcaagattatatataaatataaatgtaaattaaatataaacataaatataaatatgtgtttgtgtatatatacacatacattatgtatactatgtacattatatataatctcagaggcgggagagccagaatgataaacaaagatttacaagcaaagacttacaaactcaactacataaaacaaaacttccatggcacatccaagctaaatgaaatcaggagagaatgatgaaattgacaaacttttctgaccaatgacaaaaatactggaaaagacatttgcaattatattatggattagtggttgcatttcctaatataaaaataacatccaaatcatgaagaaaataagcacaagctaatgacaataggaaattgtatgaacagacagttcatagcatggcagaacacaacagaacggacaatgttaatgtcaattaaacctcaccttcatgcccagctagagaaatgcaattaaagctatggtgcggtacattttttatcagtagtcatggaaaaatcaaaatcattgctaacgtatttggttgttgaggttggagtgaggcaaaaactaacacattgcatgggctggggaggacgtggggattgcaaaatggtacaaccacgggaaaagccatgtggccacacctctcagaattggtaatgcatgtgccctttgatcaaataattcaaatttatacagacatattagcttccttgcaaaatatatgtaagtattatttattgtagcagtgtttataagtagcaaatgacatatatgcaatggaatattttgtagttgtgaaaaagaatgaagttctttatttactggcataaaaagatctccaaaaattattaaatttaaaaaaaataggccaggcacggtggctcatgcctgtaatcctagcactttgggaggccgagtcgggtgtaacacctgaggtcaggagttcaagaccagcctggccaatatgatgaaaccccatctctactaaaaatacagaaattatccaggtgtagttgcgggtgcctgtaatcccagctgctcgggaggctgaggcaggagaatcacttgaacccaggaggtggaggttgcagtgagctgagatagtgccattggactccagcctgggtgtcacagtgagactccatctcaaaaaaaaaaaaatagggtgcagaacagtgtatcaaggatgttttgtgtgtaaaaaagcatgctcacatgaaatttttatatttacttgtagatgaagatacacatgcataaggcatctctggatgaatgtatccaaaacagtttacaatggaggcctcagaggaagcaaactaggaatctggagggcagaggtgagacaggtgcattctatacatgcccacttatatcttttctttatgagatcatgtgaataaatcgcctgggaaaaaatcttaaattaaaattgttgaaaagtagagaggagaggctgaatgaagaggcaggaaggcaacatgtgattctcagatttggttctgttagtgttggggaaagagctgagaagttccagaaagctgccaggccaggcacagtgactcacacttctaatcccatcactttgggaggctgaggccagcagatcgctttgagctcaggagtttgagaccagcctgggcaacatggtgattccctgtctctacaaaaaaatacaaaaattagccaagcattggtggctcgcaccagtagtcccagctactcaggaggctgaggtaggagaattgcttaagcttgagaagcagaggctgcagtgagccgagatggtgccactgcactccagcctgggagacagagtgagaccctgtctcaaaaaaaaaaaaaaaaaaagtcatcggacaaaacaaaacaaaacaaatcccccagagaggtctaggtaagtgaggtccaggaaagtgtctataagatttgacaataagaggccaggcgtggtggctcacacctgtaatcccagcactttgggaggttgaggtgggaagatcatggggtcaagagattgagaccatcctggccaacatggtgaaaccccgtctctacaaaaaatacaaaaattagttgggcatggtggtgcgcacctgtagtcccagctacttgggaggcttaggcagaaggattgcttgaaccctggaggcgaaggttgcagtgagctgagatcgcaccactgcactccagcctggtgacagagcgagactccatctcaaaaaaaaaaaaaaaaaaaaaaagatttgacaataagaaagtctttgtcatggtggtgagattagggagtgttccctggggctgaaataggggacagaggatttagatttaggaagtcttctggcacctgtgctggaattcctgatctcaaccctcctatcgtgcaagctctgagacttagactctattctgaggtgttcttagattctctctaaggtgccctcccaccctaatcacaaccttggaaaggagggcttgcctcctacctgttttatttccatggaagacactgatggtcaggttctgtggagcatctgaattcaaaagatgacacatccctcttcagttttgagggttaggggagcatcctttggtcccttcccctgcccagaatccaggaccccactccaagtatcccataccctgactctcttcccacagtcactgcccaaaataactcagactcacaggagacattgagttggatggtcatctctgtggtcacatgaaaccttgggaaagtcacttggaaggtgatactggagccgtggctccagggaagtgggatgatggtgatctctgagaagtgaggggtcctagggcccagggagatgacagttccccatgtccaggaaaagatgagtgactttctgcttttccaggctgctgacacgtagcaggttcgcaggatggccagattccagagttgctgggacttggatgtcaggtgtctgggtgagggctgggaaggagagaggcaaagacctgggacacagagaggggacttccagggtgtgaactcagaagcagcctctgtcccagccccaggaatggctcccccatctgagccctaggctcctggacacagcacgcctacctatcacgttcaaagacagtgtcttttgcttgaagctgaatttcacgacaggacccctctccaaccgaaataaatacactccgccatctttcctcctggtgtctctgatgctcagggaacagatgtcagtctgggggtccccaaggaaattggaaatggtcctagcttctcttttgcagcttctagctgggtttgtttgtggccatgggaggatcccagtgttcattgtccccttgccggaaccagaagacgtagggtgggtctgagtgactccatctgtcactggggtaggagaaggagcagggcaccaggacatacaggccctcctgcaccatcaccagctctggaatctgcagctcataccccgcgtggtcctccagcatttaggctttgacattgagctcccgccaaccctcccgcctctgcccagccccctcacctccccacagcagggacagcagtagcagcagagatggcatctctgagactgcaagggctgtttagagcccccttcaggccatctgaggagcccttcccagcagacacctggtatctattttgagtttttgcctcaaacccttccctccaacagaaacacccaaaccacttttggggaagtgaaggcttagcccaattcaccgcagggccaaggacaccctagcagggaactttgttcctttcgcttccccactcagacttcagattatgccccctgaagccaattcttcaccttccctcaggagagctgtggatttggggtcattttcccaccatgcagggaaggagatgctggaagctgggtcccacctgggactgaatcctcctattccatgctcctcttcagatctgggcacgtcgggagccttgggaagccctggctgagctctcgaagttctctgagcagggaaacccgtggtgctagggttgaagcctgggggccatgaatggagcccctgacttaggtgggatatttgttgctttctgatgcttgtttgggttcaggaaggagcctggacttgcctcacagacctttcttgggtttctgtgtgagctctgactttgctgtggggctttttttcttccagaaagaacccaggaagcattgccatttactgctctcactgccctgaacgcctgccctgaacccctgctctgcctaccccttggatttctttctcttcgcaggctcttgcagcaggtcctgatgcccctccttcatgctttacccagtccttcatctgtccccacatccactaagaccgcagcatctcccttcctcatcctgcctcctcccagcagacatctggcctatgggctgccttcctgaaaactatctggcttgtggttacatgaagccagagtccacttgtggttatgagcacacgattgtcctgggccacataatgtgtgtttagcttgatcctaaatgagtttcaacctaacaccctcatctggcctctcctatctgagtctggatgtcagctacccatccgtttgacaggtattgagcacctttgacctgccccagaagtggcatcacattgacctaagaaatggcatcaaggacaaagaaaaatgaccacatcaagaccctcctacacaagaagacacgggatgacagagaaccaattctgctactgatagtggagctatggtttccaggacgagagtagatgaaggggtttgccagctgctataacaggatccagtaaatgggctggccctaaggggtgaaagtgcagattcctccctcaacccctgaggagtctgactggcacttctgatatttggggctcaggaagttaaaaaccatagaaaatattaattccccattcataatataattggcatgtactattcccatatgtgcaaattaactcttcgctgtgaacatatgcaacttggcattccacactcaaccggcataggggcagactaggagtcccatggagctgatgttcccaggagcacccctcagcctatgctggtggataatacctggtgtgggggtgagtgagaaagatcccagtagaatagcctttctcctccccactccttcctccacccatgaagactattctttattcaagagagacatgaaattggggcagaagtgtgctgagaaatatttaacaactggatttccaaaaaatacatattcataataaattttactgatataaagtatttgtagcacactgttgagcactcaatttgtcgctgttcggggtgccactatgtaactctcatggacctagggtaactgaacaaagggaggtgaacgtaggaataaaagacaagagacaaaagagcatgtttggaagaaggggtcagggggcaccttgcctctagtggacaagggccctgaactttacacagccctctgtatttattaggcaaaagagatagcgagaagtggggtggaagaagaggtcagctgcttggtccagagtaggcttgcaagactgcattctctagatgtcccagtagataacttcaaggagctcggcgccaggaagcaatggccctcagcaaaccttctggcagtgggagtaattgtgagtttgcccacatcctgcattcatgataaacagtttgctgtttgatcatatagcctccagtggaatgctgagttggtcacgtcccacgggccttcatctccctgcagcacgtaacttttaaataataataaaatgtactatactttttattgtaaattctacataatcaactgattctcacagaatgttttcactgatttttctgaacttttgcaacttgagctaacttataatggcaattgatgaacagtacactgtgtagttatgaatgttggttgatattttcatttacattaaggagtaagataaaacagaaataatgagatgtatggtgggattttattcttctgtcaatgacaggagtaaactctttgtttaatcagataagttttggaatatctacactagaagaatatttctgaatttttgtgctatttacagtgtaatgactgcagatattaacatcttttaagttgcattattaatattttattcatcactatatcaagcgtagacaatcaataaaatgataaatcaagacttgatggatagtatttgccaatttctgcagtgtaaacacttctatcatgactgacttcaagctacaaatgtgactcgtgtaaaaatataatttctgattatttccgtagaagatatttttagcagaaactggatcaccttttcaagagaaagtaatatgtttgcaagacaaagatgagtatttacaaactgctttcaaaaatggctgtaacaggccatgcacagtggctcacacctgtaatcctagcactttgggaggccaagatggaaggattgcttgaggccaggagtttgagaaaacggctgaaacagtgtccatttccccaatcttgaatgagagtaaccattgcctctctcgtttcaggaattattaatttttccagttttgttaattggcagtttggatagtcattctagacacaagaataaaggagatcacactcctgattaaaacctgtcagtgaccttcattcctccagccaaagccctcagccattttcccacataaaccctaagcagactaagaatctcattttcataggcttggccaaagtttgtcttcaggccacatgcaatttccaagggctcctcttcctttacttctgtggaaggtgcaatatcagaatatgaatgaatcagaatgatgttcttagaatcttaatattggatccatttgaacagatcagtaattgaactttgggaaaacttcagcacacttccttagcatacaatttcttgtgatgcgaatcacaactgttaatttgtattttgcttttgaatcctatatctcagagtgatgaagtctctttttaccagaggtcttagaataggtttgcttaaaatgagatatatgaaagaaaagggtcattttagtcagtgggcgagcatttatccttagctataaatgaaggtgataaacagtttcatttctgtatatagaatggtctgttcaatactatattttttgggtaaagtttcttttaatgctcttggttgtttactttctttgatttccaggaaaaaaaaaacaggcacaattgctatcagatattttgagggcaggcatcttgttgagatcattatttaataaggcgttgagtcatgaaggcagtagactggtttgaagttggccaggatgagagttcttggcatagtttaaagcaaagcatttgaaattctgaagtcctcataagttgcaaacagttgtctttattttttgaagcactttaattttgaagcacttttatttaagtttcaagaaccagaattgtttttctttttcttttttgactttcatctgcacaagactttttgtctttattttttgaaggcttttaattttgaagctctttatttaagtttcaagagccagaattctctttctttttatttttcttttttgactttcatctacacaagatatatgaagattcatagtcagaaagttttgtctgtcttcttgaggaatagccaactccaatcttaaaaaactcttctagaatgtcataatcaaatttttaaacttctaaagattagaatagatgaaataaaaaagcaaccacagactggaagaaaaatgtttgtgatatgtatatctctaaaagacttatttttagaatatataaaaaattttcacaacacaataattttaaaacacaatgaaaaatgggtggaagatttgaagagttgcttcagcaaagaggataaatgagtggccattcggcacttgaaaaaatgcttgatctgggaaatgcaaattaaaattactatgagataccactatgagatactcactaaaacatattaaattaaaaagactaacaatactaagtattgataaggcagtggagcaactagaattaccatgcatatgataaaagataactattaaaacaccaactctcaccctaaataaggaaaattcaggagcattctcatttgaatcagaaacaagacaaggatgcccactgtcaccactgttacttgacattattaaagaggttatagccaacaaggtaaaaccagaaaaataagcaagaaatgtaaaaattagaaactgagaaatatttccagtatttgcagatgatgttcaagttcccatagattttaatatcataatctaataatagagataagtcccataacttttgccatattctgttggtaagaagcaaatctcaggttccgtttgcactcaaagggatggatttgtacaaggtgtgactcagtaggtgtcaccttagggtatgcctgccccactaagagtatgagggcgcagttacccctcatcctacagatatacagatgtcccagtggagggacgccttaacttgccctgaacatacacatgcggggctgttgtacttaaagcctcctacttctatctcaattttcactctctgcattttcctttttttaaataaaatgtaccaaagccgtagggtaaatcctatgacacagtaaagaatagtctcagatttataagtggagaaaattcaaaagttctaagtccggggaatttcttagtaactcaaacaaaatgtcacactttctcacataataaagataagtgtttttattgattttacactatttgcttacagtaaatatataattgatgttttaaaataaaagcaggtttcatgcttcatgtaacaaagttaggttcagatactaatgtgaaaactcaactattcctgggaaaccatgttcaaaaaaatgcttcattggctaagcagtcttattttattattcaaatggactaaaaatgaggtatgaagtaattaaaagtaatatggtggctttaagtgcagagatggggtggcagaagctgtgaacacagaatgtaaaatcggtaactacaaaatggcacaaactacgaaagcaatatatttaaattactattttttaaaaaagaaggatcatttcagatcttcaccttcagatcctcactcagccctgcctcctatttcccataatcagccatttttttaattttatgattgctattactcaccttctagaatatatttttgtttatttgattgaacaacctcttcctgaaaattctgcccagttgggctggctgacattgatctcagtaattgtgtttttttcctttaacttgattatatttttttcattcgcctctctttaaatgaagtgtcccaagagccctaaattctctcttcaggtggtcgcttggtaggttacttcatcaataggttcatccaggtatagagagcaatggtgtaaggataacaaagatacaatttctcagaaagataacattttcaaaagtgctattaaagacagtgagttgttcagcaattcaggaaaaaaaagtctttaaatcagagggaaaaatatagagaaaaagtatttttcagaatacatgtcagtttctcctagaaatatatatacacaagtattgaataggtcccctgccaatgtaggacccaagacttttactctgtgacattccatttgtccttggctgtacggaataaaagccctttgacgatggcggcctccaatatcataatccgtatgggtgcggccatgccgtcctccctaccaagtttctgaagttgaatgaaccgcggaataaaggtacgccgttatacgccatgataactgttggcggagcgtagcttcaaaagtgttagtgggcatgcgcgcggttcaacagcgcctacggaaatcctaacgggaatgtaacccaaaccggaagtggcctagagcgaccatttagcttctgttgttaagtggatctaagcctatgtcgcttactggacgctgaagtgattgggaatattagcagtgggggttctgtagggtcaggaaggggcggctggctttgggggagtgatgaggggcttgttgggggtgggggtgcgtgataaagggatttctcggctgaagacgaggctgtgaggtgagtgacgggcttgttttggctgagcgatgaggggtttctggggtgggtgatgggtgctgtggggtaagtggcgtttgctaattttagttggataattagcctgttaattttccctcttttcttgcttattttctgcttgtagtatttttgtgacttaaattccaagtgtactttaatatcggattttatattggtccacgaaacttgctaacttgaggacagtgaacgtgcatcttaagagcgcctttgcggatggtgctggaggacgttcagggaagggattcactgtccgtgggactaggggagtcagtgattgattggcagccaagagcttcagaggttggaggactttgaggatcacactgtaacactctcaggggaccagtgatgggcaacctataggaatcagtagagtggggttgccaggggtagcctatggcagccagttgactggaggcgtagggggtcaatgatggggatttgtgagggtgaatgcattgctttctaggcagtgagtgttggggtccttcagggattggtgggtgggtcagtgttggcctcttcttgggtcccttggacatggtaaggatcagtaattgacagttgagcacatcgatgatggtttcctattggggcatttcatttggacccctatgttggggattatttgtcgttttatggaaaccagaaaattgtgctcgctgggaaacatttcttggctatcagggcagtaaagatttcagaagcctgtgccatgtcagtgactgggaggcattttggaactttctggcagccctgtagtacactcattggggatttctgaaagtcagtcctgtcagtgattgcattcaggtgcggtgggggcaacttattgtggacaggcaagaaatggtaactggaggccctgatgcatgtctgcaaattttctgtgtcaagatggggattgggacagtgattttaagttttagctctagtcagaagaggctggtctgtgtgtggtgtattatggacggggactgaaaagtccagaagctcagaataggtacaccagacagagccacctcccggcctgagttctatgaaggcaacagaaagaggaaatggtgtttctggaagctggccacgtatgggtacatgagatagtggagacagtgtacagtttagaacaaggcagatgtggggctgattccctgtttttccatttacagactgagtaaccttcaggcaaattatgtaacagcacacagcctcattatcctcatcctcaaaatgggtatgataatgcccatgatatttagctgacaattaaattgacaactttctttttttaattcatatttatcacgtgccaggcaggcactgaggacttgacaagcttcatcttggttaagtttcccaacatctgtgataaatacctgcattttcattttggaaactacaactaaagtaatattttcatattctcacagtgaaaatgtggcaaagctgcaatgaattcaccatttagtccagactcagtctttatttttaaccctgactaataactagagttgggctttctgaactttgtctactccaatgtctgacacagtgacttcacctcagtgccctcaggaaatatttgtggagtgaatgttgaatgagtgaccatgtactcattgcttttccaaggcttctgcagaacccccaggtcaggccacatcattgaggctgcaggatctctcttcatagcccagtacgactctccgccgtgtccctggttggaaaatccaaacacctatccagcttctggctcctgggaaaagtggagttgtcagcaagagagaccgagagtagaagcccagagtggagatgcctgctgatgtgaatttatcccagaagcctcaggtcctgggtccagagaagcaggatggatcttgcgaggtaaacaggggcagccctggggatagttctccagaacgtgagggcagacacaggatgcagcaggtctgggctccctgctcctgagtcagtcttgagcctcctgtcaagcgaggaccacagaggctgatgtttccacattcataggctatctgtgttctagaggaaaccatgaactggctgataaaagaggatagtagagggttggccttgggtcaagaaagaagaaactgtagtccctggtctgatcagaagccccagtcataggatggaaaagctgactctttcctgctaagcactggttctgctccttcatccaccactgggtctttgaaaaatttcaagtggtcccccccaccaaattccttgcttggtccatggggtttggcccgtttttcctctgttctcataaggtgcggcaaaatctccttcctttgtaatttaaatagtcacagggaggtagagtgagaagaggcttttaaggaccatgtgaagaggcttttaaacactttttcctgtttaaaaaggtgaacaaaaaatgctggaaaacagtgtttccagattgcccacagatagaaatagtcaggatttggtaacaagaaatcagaattcttggtatagtcaagatttcctgaaatcctaaattattctgtgtatctcttgatgctttatttacaagtctttaaatagtatgtgactataatagtaaacagtgtaccattgttctgtgatgggtttataaccaaatttacagagatgttctgttttttaaaaaaagtataataaatatgtgtgttattatcctgaaccaatatattgtgagattatatatttcagtaacctgttaaaatcatctcaacctgctagaaacatttgataatagaaagtattaaaagaagggaacattaacacaaaataaattgcacatataaatcattttcaaaattgtaaataccccaaatatttaaaagtcgttcttaaaagaaaaattgaaacatacaagtttaggtggggcacagtggctcatgcactttgggaggccgaggcgggcggatcacttgagcccaggagttggagaccagcctgggcaacatggcgagactctacaaaaatacaaaaattagccaggtgtggtggcatgcacctgtagtcccagctactgagtacgttgacgtgggaggatcacctgagcttgaggcggtcaaggttgcagtgagctgcaatcatgacactacactccagcctgggcaatagagtgagaccctgtctcaaaacaaaacaagtttaaaacatgaaattgtctaagtctttgtgacagcagtgcagatgcacaaacgtttctctcatttgcattgatgttggtcaacttgcgtgttcagaacatcttcaagtttagcgttttaggacacatgttcaatataagcttttttccttttttaacaatgaaattttttttctgcttgacctgatttccagtttatcatttgaatcaatactgctgtcgctaattcagattttccatcagtgtctgaattcatgtcagagtatatcccagtaccatgcacattatcttctctttgtggtgtgtatttccctctgctctggacagtactatttttattttgttatttttatcttttctaatgtgatggaaataaagatagtatagtgttttaatttgcattactttgtttacaaacaggcttttttttcataattttattggtcaattacttgtctttagtgagttactttttcttaccttttgatttatattttggtttggtttagcctccggatttttagagaggtttttttttttttttttttttttttgagacggagtctcgctctgaagcgcaggctggagtgcagtggcgcaatctctgctcactgcaagctgcacctcccgggttaacgccgttctcctgccttagcctcctgaatagctgggagtacaggcgcctgacagcactgctggctaatttttttgtatttttagtagagatgaggtttcaccatgttagccaagatggtcttgatctcctgacctcgtgatccgcctgcctcagtgtcccaagagagttcttacacagtaataacctaaggtcctttttgcatatgtttgtaaatactttttgttactttttcctttgaaagtaggttttagttttgtttgaacataggaaagaggatcagatggttttgtgaagcctgtaatcttttaaaagggctgtcacttgctatatttttaccaaagttccagctcctcccaggcaatcacattttacatttttagctaattattttggcatttacctcctaatcttttagtgacatgcttatattgctgcctcttggattgttaattaacacgttaattaattaagaaacatgtcattaaaaggtttgcttttacccgcttcctcatactttcacccccaacacctgctttccttgcccatccttctctagaactggttcagattctgatcaggtcaatcttccttgtttgtgattatgactgtgtaaactatattcagagctgcctgtatagacaccctgataactctctgcctgcataacttacggtttttccctggagcacacaattttatggattatttacttgcctatatacatgttaatgtattataccattttctccaagtgtgtacacactgtcttcataaattgaatttgttactaggtaattgcaaaccctcgctatttcagggacagtttttttttttgtttttttttttttttgagacagagtttcgctcttgtctcccaggctggagtgcaatggcgcgatcttggctcactgcaacctctcctcctgggttcaagccattctcctgcctcactctcctgagtagctgggattacaggcacttgccaccacgcctggctaatttttatatttttagtagaaacagggtttcaccatgttgggcaggctggtctcaaactcctgacttcaggtgatccgccagcctcggcctcccaaagtgctgggattacaggcatgagccaccacacccggccttcaggaacagttttaatcctcataactttgcgaggtactgctgccattatcccccctttacagacaagaagactgaggcacagaatgaaataagtggctcaagtttacatagtcagcaagcagccagcctgggattgaaggcaggcagtttgcttgagggttggggctgtcaatgccatctccttgaggaaacctttcctattgcttttttgtcttgatgcgattggacctggctgttctcctggcgcctcacgctgtcttctcatggtgctgtgttcaccatcacctgggaattctttttttctctgtcaagtgtccagttccttgtgtcttgaatcctttcttgaatcctttggctttctcttccacggtttaccgttactctcatttcgtgaaagtgcatcccctaggagttcttggggacggtacacggcagtaaatcctgtgagaacttatctgaacatgtctgttcagataacggagactaaacttaagaataggagaatcacttgacccaggaggttgaggctgcagtgagctgtgatggcaccactgcactccatcctgggtgacagagtgacatcctgtctcaaaaaacaaaaacgaaaacaaaagacctgagaggtttacatatatgagcatgacatgaaagtgaaatgatatgaaaatgaatgatatgaaaatgtcacgccaaaaagcaaagatcatatatttgcatatttaatagaaagatgtcacggaaaatgacttgatttaccctcacactaagttgatctttgcctgggttcataggttggaaatcatttttttcttcctaaaacaccccatatactacttccttaccacacacatatagtctctctgctctcaaatcctgaaactctttatttttaagctgttagtctccatttaaaagggtttttatgctctgtcattttctatttctttggttttggaccctctttctggaagaatttctcaactttattttctagccctccgataatcattactgccttaaaaaatttttaagagcttttagatatgaatactccttttaatgacatgatgtttttgtttaatgattgaactatcttacctaaggatatttgagatattttaaaatgtaattttatgaatagataatacacagcattcacaaattaaaacatcatgaaaagtaatttttttacaaaatactcctttctctctcttttttttttttttttttgagatggagtctcactctgtcgcccaggctggagtgcagtggcacgatcttggctcactgcaagctccgcctcccgggttcacgccattctcctgcttcagcctcccgagtagctgggactaaaggcgcccgccaccacaccaagctaattttttgtatttttagtagagatggggtttcaccgtgttagccaggatggtctcaatctcctgacctcgtgatccgcccgccttggcctcccaaagtgctgggattacaggcgtgagccaccgcacctggcatacccctctctcttttgtccctgatttgtccaggtttcttccacataggtaattatagttagtcatctgcctttacctcccaaacactaccactttcttccaaagttaactactttcgtcacttttaagttaattacttcattttaaaaaacgaggccggatgcagtggctcacgcctgtaatcccagcactttgggaggccgaggcgggctgatcacgaggtcaggagtttgagaccagcctggccaacatggtgaaaccccatctctactaaaaaaatacaaaaaattagccaggcatggtggcgggtgcctgtaattccagctacttgggaggctgaggcaggagaatcgcctgaacccgggaggtggaggttgcagtgatccaagatcatgccattgcattccagcctgggcaacaagagtgaaactccatctcaaaaaaaaagaagcaagccccagaatgggaaaagattcttgttacacatacagctgacaaaaggttcctataaaacgttgaggacggctgggcgtggtggcttatgcctataaccccagcacattgggaggccaagatgggaggattgcttgagcccaggagtttgagacgatcctgagcgtcatagggagaccccatctttacaaaaaatagaaaaattagctaggtgtggtggtgtgtgcctgtgatcccagctactcaggaggctgacacgggagaatcacttgagcccggaggtcgaggctgcagtgagctgtgattgcaccactgcattccatcctgggtgacagagtgacatcctgtctcaaaaaacaaaaacaaaagacctgagaggtttacaggacaatgagatactccttcagaaacacagaaatggccacgtgcagtggctcacacctgtaatcccaaaactttgggaggccaaggtgggtggatcgtgtgagctcatgagtttgagaccagcatgggcaacatgctgaaaccccatctctacaaaaaatacaaaaattaaggctgagtgtggtgactcacacctgtaatctcagaactttgggaggcagagatgggccgatcacttgaggccagagtttaagaccagcctggccaacataatgaaaccccgtgtctactaaaaatacaaaaattagccaggcatgttggcaggcacctgtaatcccagctacttgggaggctgaggcaggagaatcgcttgaacccaggagtcagaggctgcagtgagccaagagcatgccagtgcactccagccttagtgacagagtagactccatctcaaaaaaaaaaaaaaaaaaaaaaagctggacatggtagtgcacgcctgtggtcccagctacttgggaagctgaggcaggaggatcgcttgagtctgagaggcagaggctgcagtgagccatgctcgtgccactgcaatccagcttgggcaacagagtgagattctatctcccaaaaaaaattttttttttttgaggaaaagtgttttttaacccagtagaaaactgaagaagagacttgcttgaataggctggtaaacatgggaagatgctcagcttcattagtcatctgggaattgccagtgtaactcccatgcctgtaccaaaatgcatacagttaccaacactgataataccaaatgtaggtgaggatacagagcaaccagaaggattttgtgtgctgctggtaagcatataaattggtacaaccaatttggaaaatgatttctaattttctactaaaggcgagcatgtttttcccatgacccagaattccacccctgggtatatgcccaacatctgttctgaactggtatttaaatgtagacctgtgctgtccagtatggtagccactcaccacatgtagctattgagcacttgaatgcggctggttcaccctgagatgtgcttgaagtataaaatatatgctgacttctgaaaacttagtatgaaaacagaatgtaaagcatctcatctcgatgatttttaaaatattgaatatagaatattcaatatatagaatatagaatgttttaatatatgtaatattaaaatattacatatagaaatgataatgttttgaatataatggattaagtaaaaatatcattaaattgattttatctgtcttttaaacatggctactagacaattttaagttatatgtgtggctcacattcacggttcatgttttatttccattggatggctctcctctagaggcttgatcagagtccacttggatttctttgtttttggaaatgatacttaatagtttgcacaccacgtattttcctacctctctacttttatttttttattttgcatcatattaggtgcactttaatatctggttatctctctccttgtgataaaattgatgattgggttcagatattgtcagcctactcctccattataaagacccatcagtctttcatatggttttagcagtcattggtgatcagtaacagtgacatttttgttttgtccttcaggctgcatttatcatctgcagtacttctgtaatgaagatctttccatcatcagtcctttcattaacctaatattagttattacaggagagatcatcttgttgaaatattatatgatcatatctcttccctgcacttaaaatcctgaaatggcagtccgttcattaaaataaataatccatacccattatatattgaggcaccagcccacttctttggagcttggatggtaaccaccttccaaacatgacatagtcgcctcttatcttacacagagctgtctgcttctccctgaattcacagtgttttcctacctctctagttttattcatgctcttttctggaaaatgatttccttcacacatcctgcatcacagttcttacttccagcgtaagcttcaccaactctaagtagcattaccttctactcctaggtagaatttgcctttccctaatttgcccttccccaacagtgtcctctgcatatatttctaccatgttccctttttaaccctgtagttgagcttttgtatttacatgtcttccaagtctctgagttgctgcaagagtagaagcttatgtaattctgtgttgagcaccagaacccagctcaactacagcctcacatgtagttgcttcgtcaacatcatgctggttattcctaaattagctaaaggacttagagggaacccatttctggcctcatttttgaaaaaaaaaaatgaatgaatgaatgtaggtgtacagtggatggaggatatttctcttatttttttttaaatccctaaaaatgtgaaataggtgtttggtgggaagcctctgtgatggatcgtggtgaaaatcattaaaagcatgttcctcctatatgtgccatccccactcgccaatgatgacctaattcacagtgagctggggtacactgttacaggcatcagtgtcatttgaggacgtgaccgtggacttcagcagggaggagtggcagcaactggaccctgcccagagatgcctgtaccgggatgtgatgctggagctctatagccatctcttcgcagtgggtgagcacaactgacctgggaatcttggctggatcctgttgaggagatttccttcctcctcattgcagaacgcagtgggatatcaaagtatgtcatgactcttttatcggtttgtcctggattgtttgtttcttttgggcaccttctagtattattttgtgcccagtggaaaatgttgacttttctaatgagccagtgtaaagcttcattgaatggcctctaaaactgaagaagctacacccaaatccagtatcctttctaattaacagggtatcacattcccaacccagaggtcatcttcagaatgctaaaagaaaaggagccgcgtgtggaggaggctgaagtctcacatcagaggtgtcaaggtgagtaagttgtacccgggcaaatgtagatatctttgcagggaaccattaccagtctaccatacttttctattccctccattcccccagtgatggcccgtagattgcctcctactcccagtttcccatcaaacactgtaaatgtgctataaatgttaaatgtcctataggggctgccttaagaattttccattggtgaatactcaggaatgggattgcctggtcctggagataagtatacttgactaaatcaaccatattgctcttctgatgggctgcaccagttcacactccccatgtgcagtgcacaaggatttgcatttgcacatcttgcttgctaacacttggcattaacaaaattggtgaatttatagccctactgataggtgaaagggctgtttcatttttttttgtttttggttttggtttttttgagacagagtctcactctgtcacctaggctagggtgcagtggcacgatcttggcttactgcaacctctgcctcctgggttcaagtgattctcctgcctcagcctcccgagtagctgggactacaggcacccgccaccacactcggctaattttttgtatttttagtagagacagggtttcaccctgttagccaggatggtctcgatctcctgaccttgtgatctgcccacctcggcctcccaaagtgctggaattataggcgtgagccaccgcacccagcctgtttcattgcttaagtgttatttttctaataactgaatggtgagagcctctcatcttatctgttatctgattggctttttcatttgtttgttgcattttcttaccgcttatctctttacgtccatggagttttctgccttttttttccagtttttttgcccctaattttatttattttcttttctttgctggatctgctgtcttcttttcctcccagttgtggcacctctagcttggggccctgttcttccatatgggcatcttttcttttttttgaggcagagtttcactcttgttgcccaggctggagtgcaatggcacgatcttggctcaccgcaacctccgcctcccaggtttgagtgattctcctgcctcagcctcccaagtagctgtgattacaggcatgcaccaccatgcccggctaattttgtatttctagtagagacggggtttctccttgttggtcaggctggtctcgaactcccgacctcaggtgttccgcctggcttggcctcccaaagtgctgagattacaggcgtgagccaccgtgcccggctatgggcatcttttcccacaggaattgacttaaaggacccatccattctgaactcttagtcctcatatttttattctaatgatttatatatcagtacctctagtccctgtgcttaaactgtgttctgctaccttacttagctccacggaggacagttcccatgagatgactcacttccttaattttgggagatcagaaattggaatcatcatcatccaaataaggaattctcacctgataaattttgtgagatttttctgtttctgggctcagaaacacagtcctctaatttaatttattactttggaattcttaccagtttttcttgttttaattaagaaaaaagtgaccctttttcttaatcccagtggtattacaacaaactagatccccattttctcatatttagacaattttgttcccagtgagatatgttgatttcaggtttttgagtttagtcaagatactgacagattttatgaccccaaacatggctattttgtttcttttttcctcagtagatatgataaaaacaggcagttctatttcctactgtgtaggattaacaaattcttttcagtgatattgtcctcatggccacatatttccaatttaaaaatatacctgaatagttttcatcactcatgctctgctccattgtttttgtatgttgtttaatgtctactccatagaatgattcactttgcatacactctgctgattactttgtactttcttaatcttcattatatcaatgtttagcatgaggaaaccattgtatttaagatataggattaggatttttgtatttaggatacagaaattactgattttctgaaaatgggcagaaaagaatatttcacagtattttaaaaggatgctttaaatatttgctgagataaattcaaaagaacggagattgtatttggatggagaggacaatggcattaaatgttaaaagtattagcctttgtgcatcaatcatgtctatttcatggaaggctactcaaaaagtaagtgtatcaacatgggaagcatggatagcaaatgctggtgaagttcagaaaaatgatgtcagcctagaggtggagtgacattgggaattaattttaagggcatagtacctataactggttcaagaagccattttgaattgaaacaaagaagcagatgaagcaagcttaatgggaatagaggacatgagagtgtgcttggatttgagaataaattggacttcttttttgcaatcgacattgttaggctgtgttggagagttgtggaaaagcttttcagtacagttctgatagtttacattgaacattttgggcagtaatttaagtgttaccaggttcagcaagatttttatgacctgaataaagtgagaagttaaaaatgtttcagatcgctgcctggggacacagtggaagattgccagaataaatgaccacctgtatatgggtaaaattgctatttaagagtgaaaaatgaaatagaaaacaacctattttaataagtgggaaaaggatgtgaatagacatgtcttcaaagatgatatacaagtggccaataataggaaaaaatgctcaacttcactaattatgtgggaaatgcaaatcaaaaccactgggtgatatccctttacatccattagaatggctacaattaaaaaaacagaataacaagtgttggcaaggatatagagaaactggaatccttgtgtattactagtgggaatgtaaaatggtgtagtcctatggaaaacaggatgatgatttctcaaaaattaaacataaaattaccatatgatccagcaactccacttctgggtagatacccacaagaattgaaagcaaggacccaaacagctgtttgtacactcttgttcatagcagcactattcacaatatccaaaaagtggaattgtccattgaccaatgaattggtaaacaaaatgtggtctatacatacaatgaaatattattcagccttaaaaaggaagaggaattatgaaacatgttgcagtgcggatgaatcttatcatgatgctaagtgaataagccagacacaaaaaatccaaatgtatcattctacctgtatgaggtactttaagtagtcaattcatagagacagaataagattgtggctgccagagaatgagggatgggggaaaagggaaattgtttaatggatacagcatttcagttttgcaagatgtaaaagttttggagatccattgcacaacagggtgaatacaggtagcactactgaactgtacaatacaaaatgggcaagatggtaaatgtaatattatgcacttttgctacaataagaaaaagttaacaataaagattaaaagtgtcctttttttaaaaaaagaatgaaagatgattgagtttttttgataggacaagagtctgggatacagtttaagtgactgaaagcgaaaagaaactacatgtgatgttcatactcagtattaaaatctggtagaaaaagtaatagtaaaatttagtaactattatttttattgagaacctgctgtgttttgtgcagtatactagtaaagtgcacaggatgatcagggactcttattcttggcaaaaaaacaaaacaaaacaaaaaactaaactaaaaaaggcatatttgatagcataaagccaaaagttctaacaaagaacaattaatttcaatggaacaagggtgaaacaaattctggggaacagcttgcttgtccagtcttttagaatatatttctggggatatgggtatattcctaagttcaagaaaaaaaaattgtagcttcatggagagttgaggcataggagagttgaggcatagtcattctttcactggttggccatgtcaagataggtgaagctttaatagttttcagaaggatatacagggctgatggacttggcattgtttctaacaagtaagataaagcaggcagattggtgaggattcatctctgaaagttaatgaagacctacacactgagccccctccttcaagccttggctgcccacacatgttgccctgcaacacttgtctgttttatcctactcatcctactagatctgggtgtctagaccacttgcataagtgtcctcaggttgttgaaatctaatccccacagattagcaaagtgatcttggccaattacataaccattatgtgcttccttttctttgtaaaacaggaacacccatcatcgctacctcctgaggttattatgcagattaaatgagtatgtgtgcaccatgtaggccactgcctggcacatgctaagtgctatgtagataaatgctcatcatgtaataagggctctgtgtttctgctcattgtcagcatcattagcagcattattacatgactcagcaatttccttgtgttctgtgtcaatcagcttcatgcagtttctcctctttcttgttcattgtgtctatttcatcttctctttctccttttagaaagggagtttgggcttgaaatcccacaaaaggagatttctaagaaagcttcatttcaaaaggatatggtaggtgagttcacaagagatggttcatggtgttccattttagaagaactgaggctggatgctgaccgcacaaagaaagatgagcaaaatcaaattcaacccatgagtcacagtgctttcttcaacaagaaaacattgaacacagaaagcaattgtgaatataaggaccctgggaaaatgattcgcacgaggccccaccttgcttcttcacagaaacaacctcagaaatgttgcttatttacagaaagtttgaagctgaacctagaagtgaacggtcagaatgaaagcaatgacacagaacagcttgatgacgttgttgggtctggtcagctattcagccatagctcttctgatgcctgcagcaagaatattcatacaggagagacattttgcaaaggtaaccagtgtagaaaagtctgtggccataaacagtcactcaagcaacatcaaattcatactcagaagaaaccagatggatgttctgaatgtggggggagcttcacccagaagtcacacctctttgcccaacagagaattcatagtgtaggaaacctccatgaatgtggcaaatgtggaaaagccttcatgccacaactaaaactcagtgtatatctgacagatcatacaggtgatataccctgtatatgcaaggaatgtgggaaggtctttattcagagatcagaattgcttacgcaccagaaaacacacactagaaagaagccctataaatgccatgactgtggaaaagcctttttccagatgttatctctcttcagacatcagagaactcacagtagagaaaaactctatgaatgcagtgaatgtggcaaaggcttctcccaaaactcaaccctcattatacatcagaaaattcatactggtgagagacagtatgcatgcagtgaatgtgggaaagcctttacccagaagtcaacactcagcttgcaccagagaatccactcagggcagaagtcctatgtgtgtatcgaatgcgggcaggccttcatccagaaggcacacctgattgtccatcaaagaagccacacaggagaaaaaccttatcagtgccacaactgtgggaaatccttcatttccaagtcacagcttgatatacatcatcgaattcatacaggggagaaaccttatgaatgcagtgactgtggaaaaaccttcacccaaaagtcacacctgaatatacaccagaaaattcatactggagaaagacaccatgtatgcagtgaatgcgggaaagccttcaaccagaagtcaatactcagcatgcatcagagaattcacaccggagagaagccttacaaatgcagtgaatgtgggaaagccttcacttctaagtctcaattcaaagagcatcagcgaattcacacgggtgagaaaccctatgtgtgcactgaatgtgggaaggccttcaacggcaggtcaaatttccataaacatcaaataactcacactagagagaggccttttgtctgttacaaatgtgggaaggcttttgtccagaaatcagagttgattacccatcaaagaactcacatgggagagaaaccctatgaatgccttgactgtgggaaatcgttcagtaagaaaccacaactcaaggtgcatcagcgaattcacacgggagaaagaccttatgtgtgttctgaatgtggaaaggccttcaacaacaggtcaaacttcaataaacaccaaacaactcataccagagacaaatcttacaaatgcagttattctgtgaaaggctttaccaagcaatgaattcctagtgcatcagcatattcataaatgaaatatactccgagtttcttgaagaagagaaaatcttctcagaatcaggtctaattatatgttattgaattcatgcttcagaaaaactctagggatgcactgcatgtgtgaacacatgataaaaaagtcatgctttattttagtgagggcaattacagagaaaagagtaagcagaaatgtccttctgagtactggcctcattaaggattataaattttctccccgggaagaaaccctgactaacgcattgagaaaagcctttctgtaaagaatggtacaagacaggttgttactcgattatttatagtaaaatatgtgggaaattatatcaatgataaccctgtttattgtgggatatcaatatttttaaagtgccaacacagtcatgataggacaatattttatgtgtgtgtgtgcgccttatgtatataagcatatatataatatataagcatattattatatacaggttgagtatcccttctccaaaatgcctgggatcagaagcattttggatttcagatacttacagattttggaatatttgcattatatttattggttgagcatccctaatctgaaaatccaagattaaatgctccaattagcatttcctttgagcgtcatgttagagttcaaaaagtttcagattttgggttttcagattaggaatacccaacctgtatgtacgtatatttctgtatctatgtatgtatatatatgcatatgcagacatatgtatatggtctggtcagcatatgtgtatgtatgcgtatgtatgtatgtatgtatgccctcagtgcagtggggtttgctgcagaattcactgcatagcaggagatgtaagcagatgagttattttttaagagaatctaatctaattgtttttataaaaattattccctattgaatatttatataatgaggttgtatcaacaatgattaactcctttattatacatacacatgaatgtgcatttttggtaaatgcataaatgagattctataatgtttactgatctttatattacagattttctcttcttttaggattagctcagcttgccccccctttccatctccaccatctatagtgagcctctccataattagtgccaaccattagtctcgttcatatttttacaccaggagtcaacaaactgtggccattggccaaatatggcctcccaactgtttttttaaaataaagttttattggaacacagccatgttcatttggacatgtattgtctgggcttcttttgtgctgcactggcagaattgagtagttttggcggagatcaaatagcccccaagctggaaactgaaaatatctactctctggctctttacagaaaatgtttgccagcacatgatacacacacaaacacacacacatacacacatattactatgttcatcatcatatacctgtgtaagtactctttcattgatttataaaactcagatctcttacgtgtgtggatggtatttttttcattctacaatccatgatggattgtacacacgtgtattctatgaggttgacctgccataatttatttagccattcccacagttttgattacttatttcctccccacacacattttttgctaaaaaacggagagggaactgttatcaatacttccgagaagcagaccagcataatcttttaagtgcacaggcccaggagccaggttcctgcatttgattcctggctccactctctaccctctgcatctgctgagcaagttatttggtctcatctattctggttttctcatctacaaaagggagatgatgatagtaccctacccccatgcatttggtgtgagaagtgtgtgtgtgttaaacccttggaactgcatggacagaccaagtgctgatgaattttagcgggcctcgtatccctgagcctgcctggttcccttgtgctgggtgtgggactgtggtgggagatttctgtcagctggaagtcttttccagaagggtgttagagatgggcacccatggctttagtctccataccccttcaaggttgataggggcccacacagctggtcaggaaccagcacagacctcaggctgtgtctaaaacaaggtgactgcacatgcaggagcctgtgctgggccctggagagcaaatctgttctgtgtctcactggcctctccctgtccaggggcgtagtatcagtgaccatgtcccacctcctgagaaaggtggaagagtctcacctggggagtccaggtacaagggctggccggccgtagatgactggtgtggggtggaaaggctgcagaggcctctccatggtggtgaggggtggaaatagtgtgcacctgggtcctgggagtggcaccctgaccagtttcagggaggaaggtggcagggccctaggacaagtgtgttaaaaacttgagcccacagtgtagacacactggttccaaagacccctcaggatgtgcctcccttctcagatctgggctttccctgttcctaagcatcacctggggggatcactctgggtcctcatctccagccacatgttcactcctcacgtgggcctccctaactgtccccctcagggcaagcccttcctccccacttccagaaagctgctcgttccctggccatcccacacctctgacctcgtgccacttccggggcctgttggctttaacaacttagtttcctccctacctcgcaaccccctctgtctagagtgctcacctccctcccagcctctgtctcatactattttttctttcctctcagtaccaagcgctgggacaagccagtctgtactcaatgcctgtgggataatagacggaggaatctggagtttggttgggtgattagctttggaattgatgggtcccagggagctatctaaagttttcagtcacatgagggcatgctcacagatctgtgaaaagatctgttggctcagagaactaagagatgaataaatgttagtccaatggcctcatcatgagatgagaggtcaagagttttgagtttccagagggagaagctactattctaggcagcttgtatgaactaactcgtttattcctcacagccattgtaggaaataatctaacctcataaaccccattttagagatgaggaaacaggcttagagaatttgacgtaaactcaagaccgaaaatctaggaacaagaaaagcctggatttgaaccaagctatctgatgccagtgttttaactctcaaccattgtactactttacctcctcatgaccttttttttttttttcttgtgagatggagtctcgctctgtcgcccaggctctggagtgcagtggcacgatctcagctcactgcaagctccgcctcccgggttcacgccattctcctgcctcagcctcccgagtagctgggactacaggcgcccaccaccatgcctggctaattttttgtatttttagtagagacggggtttcaccgtgttggccaggatggtctcgatctcctgacctcgtgatccccccccctcggcctcccaaagtgcccatgacctttttattgttgggcagtgaaagccatggtgaaatgaagaatgtcctactgtcatgtgatgtgatcagaaaacatactgcccagagtcccctgcccccacccccaaaaccagtacttgatccatcctttgactgttgtggcgattggcacaaaggttgggcacagtagtagttaggctcatgggctctggagccaacctacctggatgctacacatcccagctctgcccctcgctagtttggtggcaagcaacttaacctctctgccttaatttctccagcagcacaatgggaataataatagatctcgccttgtggctcctttgcagattacatgcgttaattatgtaaagtcaagcattagaatggtggctgtccaccatgagtacaacacaaatgctcgttcttaatgattcaacaaacatggaatttcattaaatctgaaataaaggtattttgagaaattgaattccgttatcaagtgtgaagtcctgatccagactcacctcgtgcacactatttaccacaaaggtggactccctattttaaatgcattcacttaaagagacctttccctgtactaattagtgtttgttaagaaggaccttctggacatagttgaaagaaagagaaaagaagcaggtgtggggaggaggagaaggagaagggaggaagggagggaggggaaagaagatggatggacagatggaaggaaggaattagggatggcagaaaggagataaaataaactctacttttaaaagaaaccaggtggggtgagtgggagggcttccctgtgaccttggcctcaggggctctttctggcttccagataagatacccctcagctttgcactgggtctcctgaggcttggaagttatgtccacagtgaggttggtgtagaggggcagccactctttggagagcaacctgtagcccagacagttgatgccatcatcagaggatccagggatcggaggattggcggatccgggacagaaggcgaggcctggaggatggggaggggcagccatgtgagcctcagggaggacccagaaccaaccaccccacttccaacactgattcacctccagggcctctgcttgtggccaggatcttccccctccagcatatggtagcctctgaaaagcaggtggggctgggagaggagcatcccgcttagtttcacccttccagagacacaggaaggcatggaggccaaacacctgtctctgacagggtccccatgccacagcccagccctccagtccagggtagcccatgtccccctcagcccagggcggcccatacctgcctcatcatgtcaggacctgcagctcctgcctcccacctggcagtgatgtcatcctcatcatcccaaccccactacacgttggagaagccatttatcttcaggtagtgagtggggtgcagggcaaacacccctccaaggcacaagctaacggcttaattgctgttgtttccccatgttctggcttgcagcacttgtaacctctgggctcctgcagcccttaacatctgatacctttacattaagatttatcatccttatctctggaccaggctgaatacacctgtgtcccggtgcatctggccagcgggtcaaagggcctagcacacagattaacaaatgaatgagttccagttaccaaagttcaatccttgaggtggacagaagacgcccaaggcgtgtctcccatcacccttcactctcaatcctccttatcaagggcctcacgggaatagtgataagatctcagaatatacaggagggagcagtttcgggaaggggggcattggaaggaagtggagggcttggatctggggagcaagcggggagagtgctccgttccttggttttgggatcttgccttacgggtctcacctgccctccatcctggcttccacctggcagggtgtgtttgtgtcagaaagacgattgtgcgtaactgttcaccgcgtccacgtcccgagagttgcgcacgcgtggagatctgcaaaacgctccctttcagctccgcgcatgcacagagaccccaccccgcaagtccttgcccttcggcctgggcaggcgtccactcccatggctgcagggcgcgccgaagagcccactctgcatccccgagacgcggcccaatcctaggaatgtgcttagcgcaggtgctatcttcccttttcacattcccaatctctttctccgccccctcaaactcttgccatactcccacaacagcagaaaatctgaaaaaaaagtccatcccatctttgcactgacagcagtgcacagcagctggcagagaattctggcacggctattgtgcttgcgcaggcgcagacgggaagcgggccggaccggcctagtacactctgggaggcgtgcgcagaatgcgcagcgctgccgcgaggatctctgggaactgtaggcccagtttgtccgagagccgcaagtgtttcgggacgacgcaacgcaggggcacctgggagtcgtaggcggatgggcccaaagccttccgggagtcgtagtccttccgcccgctcctcgtttctttggaggttggcccttccagctccagttctgcccaggtgagcgcccatcccgcggccggccggtcctggccctttgtcgcgatgacgtggcggagttgagggtctctgtatttctctcccccgcgttctggtaggcgtccctggaaagatggcacccttttccgtgatctctcaatccctctctccgggtgggagtgctctaagcagctgttgtacctgctgacccgctttggattctgcggcccagcctgacaccttctcactctcgcccttcaacctgggtgcagtgcgagtgcaccctcctctgtcctggttacaacacagagtggtcagggctggcccagggggtgctcaggaggctgtgggaacacagaggaggtgctagacccagcccagggttcaggaaagaccttacagagcaaaggacctcaaatctaccacatccaaacgaaatcccagattccctgtcctaaacctgctcctctcacaatctttctgcctcctccccactaactgtccatccaagtgctcaagccaaaatcttggaatggtcgccagtgttctgtttctctcatccgcttccctcccgcaaccaaatcttgtgtgagtctcatcgtctctatctccagaagaggcccagaatctaaccacttctctccacttccactgtctccattctgctccgagctaccgttactcctcacctgcatcactgcaggggcctcctcactgttctgtttcttcccttgccacactccaccctctattcaggcacagtgccaggaagcctgtggaaatataaatcagatcctgtcaccagtcactaccctgccccccagcttaaaatcatccagtggttcccatctcagaataaaatccaagctccttatcctgccaacctctaagcttctggtcctttctggtcgtcctcagtcacaacacactttccaatgggctgaacacagccaggccctgcccttcatgtcctttgcatttgctattaactcaatttggagcattcttcccaccctgacccaatatctgtctactcattttgttggcctcagctcaaaggcctccagccaccctaaagaaccccctccctgttcccccccccccagtcataccaccaaagataattccctcgtatttggaaagcatcttagtcatttacttccttatccatggcctggttcctccattagaacatcagtgccctgacagctgcaacctttcctatcttgctcactgctgtgtcccagtacctagagcatgctgggtacataggcggcactcagtgggtatttgttaaatgaatgaatgaaagtttgagctgagacttgaaggtaagagttaggtctaccacagtgtttagggaagtgtcttgcgcaatgagatcagcctggccaaagatgcaaggggttgaaaaaccaatgggaagttcatctggctgaggtgagtaggtaactaaaacagggatgcaactggatctgataaggacctcaggaagtgaaccccagtactaggtgactgcagattcagaggttgaaaaagctgagttgtcttccatagagaagctgggtgaaaggtggtgttgcttccgggagacggggagcttggttaggtaagtttctgccttggggtgtgagagctggtcagttgggcactgagatatgagaggcctagatgggatcttccgtggggcatttggagggccaggctggtggacattgcgattcagagtcacccacaaacagaatgagaagaggggtgatgggcaggatatgaggactgtgaagaggcctccccagaagatattaagcaggaggcaaaaaacaagaacaaagagggaggactaaatcaaaagctgtgggagaaagtatttcaaaggggactttgctccgctgtgacagatgtacctgacatcaccgcagttgagtcctgagggctgcttgatggctcagtgacagggaagagtgctttgggcaaagagaagagccagtgaaaacaactagagacaagagtgttcctgggggtactcaagagtagacaccagtaagcaagaaggagagtggaaggagatgaggacagagaaacaaggagccagagcctgtagggcctcgtcggccattagcagttacattttgttttttgtttttttgagacagagtctcgctctgtcacccaggctggagtgcaatggcacgatctcggctcactgcaacctccgcctcccaggttcaagcaattctctgcctcagcctcccaagtagctgggattacaggtgcccaccaccatgcccagctaatttttttgtatttttagtagagacagggtttcaccatcttggccagactggtcttgaactcctgaccttgtgatccacccgcttcggcttcccaaagtcctgggattacaggcgtgagccactgtgcccagccagtagttactaaagtgagatgagatgcagggcaggatcccactggctgttatatgaaggagtgtgtgtggaggaggcaaggcagggagcatggagacctgtgaggagccccctgcagccatctaggagagaggcagacctgactagggtgctgccatggagatggtcagaagtgtttggctgttttgaagctatagtcaaacaatatgtgtgacttttcatttgagcacctggagtttgaaagggtccggacttagcattgcaatttggctccacccactgggagagtgacaactgtagtgatagaaagagcagtccagggtcctggaccccaaagcttctggcctgagcagctggaagggatggagctgccctgtactccaggagaagcccgttaggttagaggaatcaggaatttgggttttgagatgcttattagacatctgagtggcactggtctttacttgcatgtaagttagagacggtaaatacacagtcatatgaaataattccacacattgtggtaaatcctagaagcagcgtgacctgctctgaatggcaaggatgtgacggcagtagtgcaggctggaggtggtggtggcttgaggagggggactaagcctggggagtttttatgggttcaccagacaagtgggacgaaggaggttcgatgggacagttagagtcttggctgggtggggagggatgaggtaggaaagagaacagttgggggccaaggatgagccaaccccatcactgacccctcccctcccaacctctctgtgtctttcgggggccacagaagcttaggtggattctgataccagagcggggttaagttcagaactggaggcctacacaccctcacctcaaaaataggtgcaacccctgctagtctccctagaggttgatctagcctgcctgtgtatgtccttgtaagacacaatcaggacccattcctggagacagaatgcccaccccgacccctgaaagtgaaatccaattggtcttttctgtatagcccccttcccttgaacagagcatgacctccctctgtccttaagagtctctgacccctcccctcccaatctctctgaatagtcagtaatatctaccttctgatcagggctgtaacatgggtggcctcctggaagttgttacaactggtccttaatagacgccctcacccctttggacaggacacgatctaattctgggtataacctgcttgttgctccctctttttccccctgaaatcagcttaagttccttctcttcttggtgcataatgggtgcagtccaggaagccttcctggaggcagtggccttcttacaccagaacccatttataacccacgtatataagagcagcagccacagctgcccctggtctattccaggcaggggcactatctagggaactcctcaaaggcaatgaaacatgtgtaacccgcctcctctcccggtctaggagaagctgtcccttcttgcaatgcccgccccgtcatgtgcctcctgccacgtggcatgcgcctccctccgccgtccatgctcgggccaagtgctgtgcggttcctgcttctgcaccgccttcgaggcggaggtgcagcacatggtgcttgtgggctacctgctgccgccaggcgcagtggtggccctgggcacctcgggcggcaaggattccacggtgctggcacacgtgctgcgcacgctggcaccgggcctgggcatcttactgcagctcatggctgtagacaagggcatcgggcgtggcttagcgggaggatcccagtaaggagctggggaaatacgcatgtgcctatttagggccggagcctactgaaggctcatgtgggtagtacgtgtggctccctacgatggagtaaggcaggtttttcaagcctctgggtctctgacatcatcttagtgagagatgaagctggctgggcttctgggtcaggtgggcacttggagaacttttccgtccagctaaaagattgtaaacacaccaatcagtgctctgtgtctagctaaaggtttgtaaacgcaccaatcagcactctataaaaccagaccaatcagcactctgtaaaaccagaccaataagcactctgtaaaatggaccaatcagcgctctgtaaaatgaaccaatcagtgctctgtaaaatggaccaatcagcagaatgtgggtggggccaaataagggaataaaagctagccaccgagcctgcagcggcaactcatttgggtcccctcccacgctgtgggagatttgtgcttttgctcttcacaataaatcttgctgcagctcgctctttgggtccgcactacctttatgagctgtaacactgcgaaggtctgcggtttcactcctgaagtcagcgagaccaagaacccaggggaaggaaccaattctggacacattggtacacacattggcaggtagaggggctaccttgtaggagctaaggctggaatactctgctatcattattattattattattattattttgagatggagtctcactatgtcacctaggatggagcgcagtggtgcagtctaggctcactgcaacctccgtgtgccaggttaaaacgattctcctacctcagtctcctgagtagctgggcttacaggtgcctgccaccacacctgggtaatttttctatttttagtagagggaaatgactttgtatctcccttcacaaagagagatgtgaagaggtgtctctcatcgaaagtcacacagtctgaaatgctactgtgtctcttaactccttttctttataggtttctctctgacaactcttattttctctcaatgattacttcaataagtaatcatcgtccattgactaaataccagatacaagctgtgtagcctagagcaaattacttaacctccgtttcatcttttgtaaaatggggatgttaataatatctgggtccttgagttgggaattagatgagttatatataaagcactcagactagaggctgaaaaacagtaaacatgatgtaaatgtttgctgttatgatgatccacaagagcacaagacagtctctgctcctgcctgattctcacgaatgtaattataacctgacgagtgctactacggaaaattacacagaatgtgtgaatttatatcagggggtactagtggcggggaaaaggtggggattaaggaaacgtttcctgagtgaactgagacccgaaggctcagtgaataaccaggtgaaggatgagttggagtttgggcggggggtgttctgagctgaggtcacagagaggcaaaggccttgaggaggggaaatatgaccaacttgagaagcccgaagaagaacagcattttaatatacagactcaagtataagatgacaaaatgcagaataaacgtagtttccatttaaattgtatggcgactggtgtgtatgtattcattaactttctttctggtctttgtaaatcgcgtgatctgcattcccagagacacttgtgtctacagctctcttgagaatccccattagatggcccttttttctcctgtgtagtctgaaatacagttttaactgaggctgaaatggtgtttgcagcttaaagcacttttacccgctatgtggaaagagagctagcgaagggcttggtatacagtaggtggatggcaaatgagggctccccccaaggagcttgtttgtgttcccttcaggttttctgtccacctccagtctccttctggttgctccatggtgcccgggagtctccatggtccggtttccccatcagtatctgttccccctccccctgcccctctctgtcttgggtcctggcggccccgctgtgccctgggtctcccttccccgtctctctctgggtcctggttacccacagtgtcccaggggtctccatggctctgtctccccctctctgtctctggatcctggctgttgcacattgttcggaggtctccatggctcgctctccccgtcgccgtctctctctctgggacctggcggccccactgtgccctgggtctccgtgggtctcccctcccagtctctctctgggtcctggtggacccttggttcctcgaggggctccctggccagcagcgccctccgcgccgcacctcaccctctcccgtctctccccaccaggtcacaacgccgacgacatggtggacaccgtgctcatgaacttcctgcggggcggctggcccggggcgggggcctgggctctccgggctaggggggtgcccttccgcgctgccgcccgctgcagttcgcctcgcaggaggtggtgccgtacgggcacttccgccgcctcgactacttctcagaagagaggagcgcccgggacctgctcaagcgcctggaggcgccgcggccgtcggcggtgctggacctggtgcactcggccgaacgcctggcgctggcctcggccgcgcggcccccgcgccccggcgcctgcccccgctgtggggcgctggccagccgcgcgctctgccaggcctgctccctcctggacggcctgaaccgcggtcggccccgcctggccatcggcaagggccgccgggggctggacgaggaggcgacgccggggacgcccggggatccggcccgggcccccacttccgagaccgtccccaccttctagcgactccgggcctcccgccgggatccgacgcgcccgggtgaggtctgcctgtaaatgacactgtgaataaacccgttaccttacctggccttccatgtgaggtgggagggggatgggggcccagtgacctgaaaccctgaagctgggaccccagacttcggggtctcagggaggaagggtctcgagctggccttctggctctgagggaggagggggctggggggccatcctaggtctgagagaggagaggaccaggactagggctagaggaagtggggctggggaccccaggcatctgtggctgaggaaggagggcctggggtcgtggactcctggatctcagggaggagggggctgaacaccttgtgattcctgagcgagtgggggttggttggggacctcctgcccagttctctgctggttctgggtgcgctcagcatggtcctgaccctccttgagcaccagattcctgatgtttcctgtttgcccgcagtggggtaagcggagtgacgtgacttgatggacacacgccattcacagcccccgtcacgatgcctcccttccagcgcttcgtgtgcagcgcgtgctgcaccctcatttcgtctcctccacggcctcactggcagtagcctgagccgcagtaactgacctgggggctcccaccaggttggcctggctccagagctgtcagagattttgggattgcctttcccccatgctatcctgtcctcatccatcaccacctgaatctcccttgccgtctcttgtcataggtaaggaggggctggtgggctttgcagacctctcaagctctgaaggcagagctgcgcgagcctgaatcgccgcttaactcttctgaccttctatttcctcctctgaaaatagaagcaaccctccctctccactcccccgacatcagggtactcttgggaggattcagtaacttggttgttcatattaaggtttggccaccagggagcttttagtttcaggattgctgctcagctggtcctgaaaggagtgaggcccagaaacttcctgcctaacctgtgggagatttggtgttctcagtcccacctccgagctttgctggcttgcctccctagtcaggaatgccttccctttcccatctgcctgctcaaaccctccagggtccttacagaaagaggaccttcctgattctcccctcccacccagtccagggcgtagggatctcccaaaccccaccccataggtcccccacccataggtcctgtcctgactctgtggccttcccaccgttttgggttatgctctccctaattagactgatcattaagggcaaagaccagacctctctccccatcggacaataacagcattattcatccaagaaacacttattgagcacctaatgtgtgcaggggctgttctaggcactggtgagagaaaaaagacagagtctttcatggaacttagggccttgtgggaaagacacctatataatgtcagataattagtgctgtagataagaaataacataaagggaaaaggtgtaaagagctgttattttagtttgaaaggccagggcctctttgagaaggtgactttggggcagagatcaaacaaagcaagcgaggtttctagccatgatagagaagctaatgtcagaacaacacttccacactaagactgagaccaaatggaaaaacagtacacacatacacacacaaaaacaatctgatgacattggagagctaccaagttggccaggatcgcagagaaaagggaagctcattctcctggaggggccaaaaggctaaggaagcaagcagaaagcagaggataagaagatgggaacctgagttgagctttcagcagtgttatggctggggctggagacagaaatcatggtggccaggtgcagtggctcatgcctataatcccagcactttggggtgccaacgtgagaggatctcttgagctcaggagtttgaggccagcctgggcaacatacagagaccctgtctctacaaaaaaaaaaattaataaaattaaataaatacaaatagatcatggagcctggtgctaccaaggtagacaggacttgagggaccaaaaccctggaaggaagggaagatcactgaggtgagcccaacatgtttaaactctcctctcagcagtctgatggaactgggtaagccaaatttgatgttccgggtctgataaggagaggcccagtaaacaccccaaaccttccattagaactcaagaagggttacagattaaaagtaagggtcggccgggcgcagtggctcacacctgtaatcccagcactttgggaggccaaggtgggcggatcacgcggtcaggagatcgagaccatcctggctaacacggtgaaaccctgtctctactaaaaatacaaaaaattagccgggcgtggtggcgggcgcctgtagtcctagctactcaggaggctgaggcaggagaatggcgtgaactcaggaggtggagcttgcagtgagctgagatcgcgccactgcactccagcctgggaaacagagtgagactccgtcccccccgccaaaaaatatgggtcaactgggagtagacctgcccacaaaaagaccaaaacccatcttcaaactcactcagcctggggctggcttaagggatctgtccctattccacttgccagaaagcaaaaatagggtagccctagccacatgagccgatttatctttaaattaattaaaataaaattaaggattaagtcctcagtcaccctaaacacctttcaagtgctccttaccaccatattgaacaatgcagacacaatgcctccatcgtcatgaaagttccatcgcacagtgctgttctagactgtactagaatccagaggaggaaaatttcagtcagagctcaaaaaaatctctgcagtttttcaaacaaaatactagaaattcaactaaaaattaaaaagttgacaagcatgccaggagatatgacaaaattgttgaataccaagaggctgggcatcaagcacagatgtatttacaggtgttctagatatgagttttaggtatggactttaattgtcatcacgtaaaaacagatgctaaaatggagagtttcaccattgtattggattacatttttaaaagaaccattaaaattgtgaatgtgattaataataataaccaggcagaatggagtaactagtaccagacttaccctcctgctgtaaacaactataaaatagcataatgtattaggcagttttccctgctttgctccacatgcaggccatcttcccaattgccagccctggggatgaccaacaccagcctcaaatctaccaccacctgcttggctgtgtgcttacagaggtagtagctacgcaggcaacagttttccatagaactttctgagatccccctttgggggtcccatggtaacaatgggcatacttggcttttcatatatccctgcacgctctgtcttgcctacccacacctgttcttcaatggaactgcttaatgatgctctcatgatcatcctgccttctccaaagcatcactttccagctctaccacatttgcattaagttctaggtcctctagtgagcgctctattctcataaaactcttggctgctgtttccctggccacactcttgtctggtggagtgatgaaaacctatggagataattttaagctctgggtcacattatccttcttcagggcatatttactgttgcttgtggcaagccgaccacttcaatttgatcagatattgaggaaatttggtctggctttaatccttatgaggtatcatctagttccaactcatccttactctacaaggtcccaaccacagcactacagtgtttaccatggccctttttccttggcaagccctcagccataacttttatcattctatccccatgagattcaaatgttctacttagcttttcagtctatgcttggaatcagcaacctgtttcatccaaaggattgggttgtggaagacatgaaggaccctgagctgaaagcagaggacccagctcggggctgatccacaggccactcctggtaccataccctcctctgttccccaggtcctccctctccctgcaagtgctgacccagacacctgacattcacatcctaggtatcctggaatctgggtgcaatggggctctgacttccccatgtcagagcctgctgaggatataggacacccaagaactgttactgggaatgggtcaccctgagacacacctccctccacccccacacacacttattgtggttgtgatgatcagaagagcttgcaccttgcacttttctcactccaggatccccagatggacccagatccagttcgtggctattggttctggaagggggccatcctcacctggatcctccagtaccaaacataacagagtctaaaatgtgaaagaagaaggcaatggcaaatctaccttctctgaggcctccaaactcgcaactggccctcaaggatgagaggtgctcagatatgggacacgggaacacctaagctctctgtaagtagagtagtactctacctttcacatttagaggttatgttttctatttgtgacaatatctcactaaaagtcttctcctcatgagggaaaaatgtcatgctcccctccttcttggcatctctgttgctcagtgaaggtccccaaggaggtggaatcagcctacggttcttggtgtctcttctgcagcttttgacctggtctatttgtggaaataggaggatcatggaaatggaaatgttgacctcttccacaaaccaaaagacataggctcttctagagtaaacacaaaaatttcaagatgagagatcaaagcatgagaatacagaggcagtttgtcctgtaccacatcttcaaatctcagacctgcagcttctatcctgcatatttctccaagctgtaccccaaaatgatgacgaaggaccttctgtgaagtcacatttcctgcaatcctcttgtccctgcacctgcacagcaggggcaacagcagcatcttgggtttggaggggggtgagtctgggactcctgacatcgcctgatgagtctcttctacctggagatcaaggcagctacagaaagagcacagctagagacttttcctggattgagctgctccaagttcctctctctgttaggagtcctcttccctcaaacaactaccagggaagtgaaagctgacctccttttaccccaggcctactgataacctgttcagtgccccctgccatctcattcctcactcagatgttgcctcctccaggcatccattcctacctctcctcagaaaatgaatggggcatgccccacctcttctctgttcacttggaactcggagatctctctcagagcagaagagtgtaggagccctgaaactgaatcttctgcccctccacccatcacacaagaagtcacgagaaggtggaactgaaactcacctgcaaggggggcccttcatggtcagagacggtgactcagaactgaggccctggctccagcttcacactcgactgtgatgtttgtggtttttctggtgtcaatttgagttcagaaagtcactgaatttttgtatgtctcctcgcttattctcaggtttctgataagcccttcactcacaccttcagtgtgagttttgacttcttgacagttcctccagccctatgggcctcccatcttcacagtatttatcagatctctccctccttaacgcacatccattttaccctgacattgccttgcctgttctgcccttcatgacaactctctccatcctgtggtccactgaggccccaggatccttttcctagtctaaacacttactattcatgtagaatgaaggaaaacttagaatttatttctgtgacccctcagctccaaatataacttcacaaccagccttctaatagatccttcattccttcatttgagctgattcaggatttggcacagagtcaggtatggaaaaggatcacatatcatgttctgtttttcagaacaccatgacaggacaaataagggattcaaagcaagagcaaattatcaactcactggaaaaggaagggaggaagagatggagcctaccacatagaaggtttcctggaaggagtgagggcagagtcagcccagagaggcaaggatcccagtggcctgtgagaaatgcaccatctctctgaagttaagtcttctcttccctaaaatgagggggacttcagaagaagactgaggaggagtttgaatgtcctctgaccagcacctctgtcctgcagcacagaatgtaaccaactctgctttccaaccttcttacctctgcatttgagacaggacagagttctgctcccagggggcgctccacccgccatgcccgatttggggaacaactagcccagggttggcgctgtccatggttctgcaccacaactgtgctctgagttcaggaaactcccaactctgccatggacacgaatttacaagcacacggttctgagctgtaggccagcggggcacctaagtcagagaggcttcgaaaaggctgggtcccttttgggaaggagaggccagggaaagagacttatcgctgtgcttttcctctcactcctcttgttgagctaaggatcattcttttgaattgtagtaccggcctggctaagggacagggaagaacaaggtatttttctgaagttccagattatgctgatgttgctggctcttggaccacgctttaagtagcaagtccgtgcctggatctcctctcggataagggtttaggaaagagatggacattcactgaagctccccaagttccagactcagggctgtgcttttctatatatgcctcatttaatcttcataaccaacctaagagaggtttggttaataattctcatttgacagagtgggaaacagagactggatgtatacgcgatttcatggggtctcacattattggtgcatatatatatgtgtgtgtgtgtgtgtgtgtgtgtgtgtgtatattttttttctttttttttttttttgagacaaagtctcactctgtcacccatgctggactgcagtgtcatgatctcagctcactgcagtctcaacctccagggcacaagtgatcctcccatctcagcctcctgagtagctgggaccacaggcacctgccaccatgcccaactcatttttgtttattttttgtagagatgggttcttactatgttgcccaggctcttcttgaactcctgggctcaagcgatcatcccatctcagccttccaagtagctaggaccacaggtgtgtgcttccatgcccactaacttttttttctttttgtagagacagggtctcactacattgccagactcgttccaaacacctgggctcaagtgatcctcctgcctcactctcccaaagtgctgggattacaggcatgagccactgagcctggtgatattttccactgtgatgttgtcaaatctatcaagatttttggtaagaaggatgagtttttattaactttttgtcataatctccttaaagaaaattattttttcttcaaaaaatttaagaaaagatgactatcagaagatcagacatttcctagcttgcaatatttttccatgtttgtgttatcagaaatatacttaccattcacattgtgtgatcatctgttatgctgagaaatagaacatgcgggcaccccaggaatcttagaacccctctttgtttcccaccctccctgaccttcttatgagtaccaccttgctgatatttgggattatccttttccctgcctttgcccataagcataatacctgtgtatatatttttaagcaagaataattgctttaaacattcacacaaatggaacaatgtggtaatgtgtattttgtatggccaaataggactgcactagctttccttttattaatgtcggcataatatactttcacttttggccttctctatccttgtactttacgtgtatatgttgtaaagatcatatacttggaatccatccaagtggactctgttttaaactgaagcatttatccaattatatttaacataaatatcccatgttatattttgttttctgtatgtgtcaccaattctacattactttatttctccgttttgtttgtttgttttgtttactaagtaattttgttgttgtttggctttttgtttgttttttgagacaaggtctcactctatcactcggcttactgcagtctccaccttccgggctcaggtgatcctcctgtctcggcctcccaagtagctgggactacaggcatatgctaccatgcctggctaaattttttgtacttttttgtagaggtgtgttttgccatgttgcctaggctattcttgaactcctgggctcaagtgattctccacccctcggcctctcgaagtgctaggattacaggtgtgagccactgcgcctggctggtttactaagtttttaatagtatacctttagtgatcactaggttgaaagttatatattatgattctgttcttttagccgtcatgagaaaaatttacagcatgccttattaacctatcaaagtctttagtaaatgaaaacctctctctcctcctggataatatatggatattgggacatgtaaaatacacttaccttggtacttaactattgtgattgtcaggaattctaaactatcttttgtttttattaaagctcccccatttacttgctctgaaagatcattattgctttctcatttttgagttgactttactgagtatagattgcaaattgatgttagaaatagtatttgccttcttctactctccaggttgctactgataattcagttgtcaattaaatgacttttcttttgaaggtgatcctttttctctggtagctgttcagatttttttccttgtcttcagttttgattcagccttaccttgacacaaacccaatgtagggatggtctcttttgacatttgcaacctttcgctgggccacagacttaaccttcatttccagagccacatgcaagaccaaagaaccaaagcttcctttttcaatatgagcaaatgcccctgggaattttggcttagtgattctgcttacttctctgggttcagcctttccccagaattttggcctaagtttccattttcttttcaggcattctatactatttaagggaaggattctttttctactcattttttccccaaaagattttattattttcaacacaaggcttgatcaaaattatctaacctgtcataaccaaaacagtagtcacaattcaccttctttacagtgatgaaaatgaagtttgggtggtagatattgagaatcaatgtcctcccagtactccactggaattatccactcatttcctcatgaccacttgctgaagtttctaacattgtcatttatctgggtttggagataccctagataagtaactggagaatttttagctgcttttggtttagcattttaaaaaataaattagttcaattttagaggagggagagtataagttctttcttcagtccactcttccaactcaagaccacccattaactcatgtttggaggaaaagatagtgtaagccagatgaaagcaaggaggcatggcttccaggaggaggaatctcaaattgcaaagacagtgtggtatgaaccagcatgaaaggcttaaggaagggttaggcaagaggaaagtataaatgaatagatagcagggagatcatgaaggactttatgtgtcaggggagatgcttgtgatatattgtctaaggccagggggccgtgaatgggtttgggcaggaaagagttagactcaactctttggctgttggaaggattcctatgggtctcataaatgaaggactggagccaaaggaatatgatgcaaggattgcaggtaaaagtgggcaaagatatgactctggcaaggatataagatcccacatcatgaaccaagtgccaggctgaggggctggtctttcctagggagtcttcgaagagttttgggaaggggagtgacaccaacatattgctgccctgttttttgtgcctggtcatccccagccttgagagaacttgccagcaggacctttctattcaaggaagagagaccagaaagcactgagcacaacgccctgttccaggacccatgttggttgatttccatgtgttgatttctttaatgttcacaacaacctttgaggtagcatgcatgatctctgatttacagaatgggaaactgaggcacagagggatgcagtgaattgcttgatgacagtgccagggcctagatttgagcccacctctctaattccatctgcttggagcacttaaacatcagttaatgttaacattgccacaagggctcttcgtgcttcagcaagtggtccctgacttgtcctttcccccagacaggctgtggctcctccagccaggactgaactctgggcaaatcctcacttgcttgtcttgatctccgagtactccgtggtgcttggggcctcctggtccttaggctccctcgacttcatctcagaaaaactaagggaggcataatggagctccttttgttcttccaagggaggggcatccccaggaggagatgcttgatctccggggctgtctggccagggcttcttcctggaaccctgagtaaaggggaaggaaaggtgtcacagtaggaataaagaggcaggtgtagaataatgagttcttatatttatatgttgccttgggatttattttgaatgtaagttggactttctcatgccagaagcagggcttagtcacctggacacaatttccaattctctacctcctcccagttccccaaggtggttaatccaaatgtctgccttatacaaccatctccttgtgaccagctccctatgggacatacagctacaacctacttgacttacgtattgactcctgtgtccctcataggctgcgcagatatactgcagcaaccacctctcagtcacagtgtggctccacagaactcctgcctgctagctctaaacccccagttagaactccctgtgggaagcctgcttagattatgccctggactctaattaaggctttggctcatgggttcttctctctctctctctctctcttgccccctacccactggatgagcacttgcgtcctggtcagttccctcctttccattcgcccttccaggcttgctgtgctatcttctctctgggacctgtgagtaataaactgcttctgttatttcatgtgttttgttgtgctgtctcctctgtgtcccacccgcccaacagacctgaacctcacttcttttctggtcaaggctctcctagagaatagctgtcttggtgggaataaaccggacacaggtcataggaaagctgcaagggaatctgccaggataaacaagtttgctgtgagagggggtcacaggctgggcactcaggcagcaggtggtgtgccaggataaaggagtattctgtgaaagtcacactgtgaacatgatggccagatctctggggttcccattcaaggccgggctagattttatgaccactccccaaagagagacctcaacaccaaataagagaaaaatacaacaaatggttcccacagggaagttgggctgatgtgacatttatcaattcatccttttataatccactcctcctaaggacaggccataggctgcctaggtcagggtctatgtctgatttctcacactgtacgtgcccaggaaccggcacagggcagacagggctgggttcaaatcccggccccacctgtccatatacatttcctgtgaactcaactattcgctcattctttcaaaattttgtaatactatgattgatcagaccatattgaggacttactaatcacattgaatcatcaccaaaaaaaaacccacaacagtataaaagatattctaattatccccaccttacacacagggaaactgaggtggagagaggttaagtagcttgcccagggttattcatctaatacatggcgaggccaggattcgaactcagccctgtctcccctgtttcaggttctgggcacgtacagtgtgagaaatcagacatagaccctgacctaggcaggaggagcggattattgatgaagcaaatgtataccttcggcataggttacaaggtgtcttatgtgcaaaccagaaaagagatggcaattctgatcctggacccagtttccatgaaagagaaacaaaatggagcagatcctgtccccagcaaagatggtaaccagatacaagtaagcaatttctttcctctcccaccttcacccatatccctacccatcacgctatggaaaatatgttgaaagcaacgtgagtcttcaaacagtagctcagaagttttctttttgagacagagtttcactctgtcatccaggctggagggcagtggtgtgatttcgtctcactgcaacctcccgtccctggctcaagcaatcctcccacctcagcttcctgagtagctgagaccacaggcacaagccaccatgcccagctaatttttgtaaagacagggtttcgccacgttacccaggttggtctcaaactcctgggctaagcgactggcccagcttagccttccagagtggtgggattacaggtgtgagccaccacacctggccatacagtttttttaaaaggactccgcagttagggaaaaatggcttcattgtgtcagaaaaaaatagactttctggagagagctgcttatattaggcacaagaaagatgaaataaaatgaaaaagtggctatgcacaccagcattatgcaggcaaaggaagaaataaagacatatgtctatcaataggtgtgcggtatatgaaataaaaagggtgaaattgacaactgaaagaaaaggcacagctcagattagtaaataggacaatgcagtatgttcaccctttcactcaatagctctttgctgagtgctttctttgggctagatgccgttcgtataaatgaggacataaagcagactgaaaccacccaaatacctccccgtcatgcagttccttgttagacagaaggaaaagtaatactgggtaacagttataagtgagctccctgtgagcttgccactttactaagcactccttgtaacaatccgagacagatactagcatattaataacccaatttctataggagaaaacaaaaaaacagagaggttcattagcttatccaaggtcacacagcttgcaagtgggtgaatctagaacctgaatgcaggacgtcaaactccagggaccatgctgtgcctcgctttaccattctgcctatggcatgaaagtgtgcagaatggttaaaggtaaaataaaggagaaaacaaagctctctctaccatagttcttgtcaaaagagtgaattcatacaccggctctgttctccaagacctaccaatgatggaactaaagatggagctcctgggtgaacaaaactttacaaatcaatttatgatcaatcaatcacactgatatccctaggggaaagttaaggctcatttgaagaaaaggggtgggagaactgggcggggggacagctggcttgttgagaggatgggttagcccaaacatacttgaattctgctcctttctctcctctacccttccagtgggacaaacattgtctgcccctcactgcagaattcagagtatggacaggattatgatgtgccagtgtccaacaggcatgtgttgggtaagcaccagaggcccactggggtgaggagaaggagaacggaggtggaagctcactggtctttgacattctccttgccattttctccactccaaactcccagggctggtggatcacaatgcaacgagagtccttgaccaatgttgcttctccacgagggtctgaagatggagggatgacttaagctgccttactggggtgataggaagtgggactggttgggtgtggtttgggttcttgaggggatccaccctggggcttgtcccagtcatttctctttttttgagacgatgcttcactgttgttgcccaggctggagtgcaatggcatgatctcggctcactgcaacctccacctcccaggttcaagagattcccctgcctcagcctcccgagtagctgggattacaggcatgtgccaccacacctggctaattttgtatttttagtagagacggagtttctccatgttggttgggctggcctcaaactcccgacctcaggtgatctgcccacctcggcctcccaaagtgctgggattataggcgtgagccaccgtgcccggcgtccctgtcatttctttggctcagtaagcctgacacaggccagcatctgcccttccctcattcaagaaacactgccagagtagccaataaccccaggggaatgtgagctcacagctcagaaggctgggcacctttgaagaaaagcaaaccaacagaacctgatagaccactagaagcacaagtactaggacgctttggtcaagaagctaaactgagcatattacatgcactaaaaagatgtggcaatattagcagcatgaaaacaagcataagaaactttgtcaataacaaagtgtgcatgcaaaatgaatgtgaaacataataaggaattatgtaattgtgtacttgatgcaaaaagggccatgtggaaatatctgaaaaatatcataggaagagcccaatggatgggatggagaatagaatgactataattgagggcaaattagtgagctagaagggccgtcagaagtatcccctaaaaggaagtagggaaggatgaagactagaacatatgagaaaaaggttaagatagatggaagatagaaatagaaaactggccaggcgtggtggctcatgcctgtaatcctagcactttggaaggccaaggcaggcagatcacttgaggtcaggagttcaagatcagcttggccgacatggcaaaatcctgtctctaaaaaaatacaaaaattagccaggcgtgatgatgtgcacctgtaatcccagctactcgggaggctgaggcacaagattcacttgaacccaggaggcagagattgcagtgagccgagattgtgccactgcactccagcctgggcaacagagtgagactgtcaaaaaaaaaaaacaaaaaaaaaaaacacttgaacatttagataataatagttttcaaataagataaaaaagaaataggccgggtgtggtggctcatgccagtactttgggaggccgaggctggcggatcacaaggtcaggagatcaagaccatcctggctaagacggtgaaaccccgtctctactaaaaatacaaaaaattagccgggcatggtggcgggcgcctgtagtcccaactactcggagggctgaggcaggagaatggcgtgaacccgggaggcggagcttgcagtgagaggagatcgcgccactgcactccagcctgggcgacagagcaagactccaccttaaaaaaaaaaaaaaagtagaaaaggaaaaatatttgaaaaaaatagtggaaacaaaatttccagagttaaagaagatgaaacacctcagctgaaagggccccacgagtgcaagaaaaaagatgcagggaatcccatgcctagacacaggacagtggatcttaagaatatcagaaccaaagagaaaattataaaagtttccagggaaaatgagtggattacctacaaatatgtgagattaagaatgacgtaagatgtcttaacagcaatactaaatgcaagaaacagtggggtggagtttaaagcaccaaaggaaaatcactttaattttagaatgtatatcctgccaaataaaattaaaatgtaaggggataaaatatatttccaggcatataagtcttcagaagccttgaggaacccaaactgaaaacccactggggggaagaattcaaataaaaagagagaaagagaaagaagaacagaaaatctgtgataagtatggaatagaaaggtgacaaaatacctcaacaaaatgtgtagctgtatattttttaaaaaatcaaataatagaaaaatgctaagtatgttcataataacacagaacaaaaactgcacatttgtagaaaatatcaacattgtaaagagttgaaggaagagaggccaagagatataaaagcgcaccaaaattctttttgttagatgtaagacagagatattaatttttttttgaggcgagagtcttgctatgttgctcatactagattcaaagtcctgggctcaagcgatgctcctacctcaccctcccaagtagctggaattacaggtatgcatcactgtgcccggcaagatattaagcttctaagtaagaaaggagaaaaatgaaatattgaaaaagtgggactaagtgaaagtaaaaggtaaaatagtagaaagaaatccacatatgtcagtaaccataataaataccagcagagtaaactcaacaagggatgtcaaattggattttttaaaacctggttatatactgtttacaaaaatcactggtagagcataaatacataaaatgttgggaggatgggagaaaatgaaaaagtatcaggcatctaactaatcaataagaaactagagtagctatattaagatccacatgccgcttcattccagcccgcatgagtgagtgagaccctgcctaaaaaaaaaaaaaaaaaaaaaaaaacatccagtcgaacagactttaaagcaaaaagcatcattatgagccgggcacagtggctcacacctgtaatcccagcactttgggaggacgaggtgggcagatcacttgagcccaggagttcaagaccagcccggtcaacatgataaaaccctgtctccactaaaaatacaaaaattacctgggcatggtggcgggcacctgtaatcccagctactcaggaggctgaagcaggagaattgcttgaacccaggaggtggaagttgcagtgagccgagatcgtgccactgcactgccgcctgggtgacagagtgagactctgtctccaaaaaaaaaaaaaaaaaaaaaaaagcaccactatgaagagaaagaattactatgtttgataaaatgttcagttcactgagaagatataatgcttttctaaaatatatggttttaatttaaaagtacatcaaatataagaaacacaattgttagaattacagtaagaaattgacaaatacattatcataatgtaagatttcaacacacctctctcaagtattgacatgttgggaagatctgttgacatctgaagatttggatttgaacattacaattaacacactggactgttaatttaagaaataaaaaatatacattgttgcccaggctggagtgcagtggcacgatcttggctcactgcaacctccacctcctgggttcatacgattctcctgcctcagcctcctgagtagctgggactacaggtgcctgccaccatccagcatgcccaggtaatttttatatttttagtagagacggggtttcaccatattggccaggctggtcttgaactcctgaccttgtgatctgcccacctcggcctcccaaagtgctgggattacaggtatgagccaccgcacccggctaaaaacatacattattcttaagcacacagggaaacatttacaaaaattcattgtatacaggccacagatcaagtctcaacaaattttaaaagtagatatcataaaaccatgtattctgaccaaaaagcatctacttagaatttaattatgaaagatgtttaaaatcttcatacctttggaatttttaatcccaaataatttaagattcaaagaagaaatcacaatgttgttttaacaatatccacaactgaatgttattcaaataatacatatcaaaatttgtgcaatgggatgaaaatgaaattctgagagaaatttatccctaactacgttttatagagaatgaaaatatagacactaagaagctaagtatccagcttaaaaatttatcaaagatcatcagaataaaccaaaacaagtagaaggaaggtgctgagaaaatgagagtaaaaatcaataaaacagaaaacaaagatacagtgagaaaattctacaatcccaaaagttggttccttgaaactgataataaaatagggaaagcaattaacaagatttagctagaaaaaaagaaagaagtcacaaataaccaatgtcaggaatatttctaaaaggggaagtaatctcgacaaaaacaaataatataaagacaaaagaatgccacccatatccttttgtcaaaatatatatatatatataacttaggtgaaaggaacacgtccctagaataaagctcgctgaagaatacataaaatgattaaattaggaaaattgcacatagtgacgccaccaggcccaggtagtttgataagtgacatctatcaatcattcaggaaacaagtcatttcagttttatacacactcttccagacagtagaaaaagagagactagtccccaatttctcaatcttatcttgatacccaaacagaagaaacaggaggaaaaaggaaaatgacaagtgtatttgaccatgcatatagacgcaaaagtgctgagcaaaagatgatcaaacaacctactggagtattaaaaaaatgctatgaataatatggttttctcccaggaatgcaggagtagtttcataccagaaaaatctttaattgtcattccccatggtaacagattaagtaggaaaaaatcctatcagtagatgcattcaaaaaatacaacagaagtttaggataaaaacttatttagtgatagaaaggaacttccttaacctgatgaaagttcacagaaccaagtggcaggatattgggtgcatttccttcaaaatcagcagtagcaaaagatgcccatggtcactatgtctactcaactttgaccataatctcacccagcatattgaaacaagaaaaaggaaagaagtgcttaggacaaagggaagaaataaactgttattattttgcagatgatataatcatctaatttgaaatcccaaaacattctaaataatacccaagatcaatgtgtgattttttttctttttgtagagatggagggctcactgtgttatcccctggccttgaactcctggcctcaagagatcctcctgcctcagcctcccaaagttctgggattacaggcatgagccaccaaacctggcctaatttgtgattttgttttaattgaaaaaaatttatttaaaatacttcaatttctatatactagttatttgaactaataagggagcttggcaagttggaaggaaatgaaatcaattaaaaatgagttttacttgctgcatttactgagagaattatgacaattctctaaatccagagagctgacatcccagaggagatgggtgtcactatgaagagatgcacagttatagtgaatcccctcaaggaacccagctgagaaattcaaccccatcaatataggaaagaaaaaggagaagttctgtgttgccaaatggtggggaaatgaaaggtaactggctattcttcaaaccatccatagtcacaaactgcccacagtctgaggtgttacacagacttccgttgccagatgaggttaggtttgcgtgtcctcacttcctcaaaaaaagtgattattcaggacagtgggtcatttgttgaaatctgacatctgttagaagagaaatacatctgcagagtatacatgaggacaggcatttcttgctcagtacctgaagcccaaaaggatgagttgattctttaagaaaatagcattacacttgcatcaaacccagctgctttgattcagcaagccatgacagttaaaaataggaatatcactaatttttcagatggtatctatatttctgaaaaagaagagatcagcaggcttataaataagatctaagaattctccagctaccaaagcaagaagatgctaaaggacacatgcaagaccaacttgtgattttttttaattacaaaaaaaaaccctcttatattttttaaatactttcattctgcattctgataaggaatcagaaaatgcacttttaaaaagatagcatttacaatagcaacaaaaactggtatttaggaagaaaaataacaaaagatgtgtaagacctgtgtgaagaaactctacattatctctttaaaacacttaaaaatatttaaaggaatagagagagaaagacctactgtcatggataagaaggcatgaatttctaaacaagtaaattttttccacattgagctatagattcaatgtattttttggaatttgacaacctgattcttttttgttttgttttgttttgcttttttgttttttgttttgttttgttttgagacggagtcgtgttctgtcacccaggctggagtgcactggcgcgatctccgctcactgcaagctctgcctcccaggttcacgccattctcctgcctcagcctcccgagtagctgggactacaggtgcccaccaccacgcctggctaattttttttttttttgtatttttagtaaagacggggtttcaccgtgtgagccaggatggtctcgatctcctgacctcgtgatccacccacctcggcctcccaaagtgctgggattacaggcgtgagccaccgcgcccggccttgacaacctgattctaacattaaagtgaaaaaaaaaaaggaccaagaatggtcaagatactattgaaggagattaaggaagaggttttgctgtactctatatcaggacttatttttgaatttatagacagtgatgactcagggacagtaaaattgactattggagtagaatagagaccacagaaagagaccgacaaatatatagaattttaatacatggcagaattggcatgttgctcaatggagaagggagaaggactattcagaaatgaaggagaaacatatatggatcaacactatacaccatacacaaaagtcaaccccagacagagtgagtacttaaatgtcaaaagaaaagcatactctctatgtccatcagttcaatttttttttattcttagatcccacaaatatgtgagaacatgcaatgtttgtctttctgtgcctgccttatttcacttaacataatgatctccagttccatccatgttgttgcaaatgactggatctcattcttttttatggctgaatagtactccattgtgtatatgcacaacattttctttatccattcatctattgatggacacttaggttgcttctggattgtttgcaactcaacggatcaatgcttgaggggctgggtacccaattcttcatgaagtgtttatttcacactgcatgcctctattgaaacagttcatgtaccccataaatatatacatctaatatgtacccacaaaattaaaaataaaagcataaaacttttagtagaaactatatttgaatatctttctaatcttaggatgggtgaaattttttttaatgagatccaaaaggtactcaatagaaaagagaggatttgtgaatatgattatattacaactaggaacttatgttcattgaagatcactttaagaagtgaagacaagctacgcattgggagaagatatttatatttacaacacatacaatgagaaaaatagtgtaaaaatgtataaagccctccaacaaattcattaagaaaaagtcaaacacccaataggaaaatgggatccagatgtgaccaggtgttttatagaagatgaaagcagagagagatttttcatcttcactggtaaccgaggaaatgcaaatcaataccatagtgagatagtaaaatagcctccaaaactgagaaaagcaagttggagagattacagaacaacaagatttcctaggcatagatgagagtataaatggatataattgctttggaaagccatttttcatgaccttgtaaagatgcccattcacatgcccagcgatgcggcaactcaatctttaggtgatgctaaaggaaagctcgtgtgtgttagtacggtgagacaaggataagaatgttcagaacggctcaaatggaaacaactcaagtgtgcatcaatatgagcttaggtgatagacacaatcataaaatataatattataagccgtcacacctataatcccagcactttgggaggtcaaggtgggtggatcaagaccagactggccaacatggtgaaaccccatcgctactaaaaatgcaaaaatgagccttgcgtggtggtacatgcctgtaatcccagctactcaggaagctgaggcaggagagttgcttgaacccgggaggtggaggttgcaatgagccgagatcgcaccactgcactccaacctgggcaatggagtcagaccctgtctcaaaaaatatatatattataagcaggaaaaatgaatacaactgcaactttatacaacatgaatgaatcataatacaatgttgagtctacaaagcaagtccaagaagtgtgcgtggaacatgataccctctgtagattcataaacaattaaaactaaatagtggcataagcctacatatatgtgacaacactaggaagacaagattcacaacagtggttactgggaatggatcagggagcaacacaggtggatacaagttatcaccaatgtgttaggtcttaggttggatggtgggtttgcagttatttatcatattatgaaccaaagtgaaaaagtaaaagtaaatgatgcttgttccagtcatgacagcttggtcatgaactaagcattttggacaattcgttcggggcaacactagatcaattttataaaagaggagaggagacacgctggacagaaacagcaggagagaaaactgcaggggctaaagaagccccagcccctgtccttcaagaattccacagatattggccgcacgcggtggctcacacctgtaatcccagcactttgggaggctgaggcaggcagatcacctgaggtcaggagttcgagaccaccctggccaacatggtgaaaccccgtctctactaaaaatacaaaaattagccaggtggtgcatgcctgtaatcccagctacttgggaggctgaggcaggagaattgcttgagcctgggaggcagaggttgcagtgagccgaggttgcgccagtgcactccagcctgggtgacagagcaggactccgtctccaaaaaaataaaaataaaaaagaattctacagatatgatgagtgggtggagacaggtaaaggcagtggtgatgtgtgatggggacggggatgcatgtagggctgtaaacacagaagagaaggggcagatatcaacaggaggggaaatgactagagtagcagatactgagattagagctggaaggattagatgaggtagtctggtggaaacagggaaggaaaggtggaagaaactatacttgcaagggctcaaagttgtaggacagcaggtccgtatggagacagaaggccagcgtggccaggccacggggcaggatcagaggacagaaacaggctgaagtggccacctggtgtggggcaaggaacatgggcctgattctctaagcaacaggaacaaacaacaacaacattgaaactccaggctgcctgggaagtaatagttttggggcgatgattctggcagcctgaagtttggaatgagagatggaggcagggaggaagtgaggcaggctctgtggtcagtagaggtggggagggaagatgagcaaaggacaagttagttttacttttagaaagaaggttggtggccgggcgcggtggcttacgcctgtaatcccagcactttgggaggccgaggcgggcggatcacctgaggtcaggagttcaagaactgcctgcctaacatggcaaaatcccgtctctactaaaaatacaaaaattagccgggcatggtggtgtgcgcctgtaatcccagctacttgggaggctgaggcaggagaatcgcttgaacctgggaggtggagtttgcagtgagccaagatcgcaccattgcactccagcctgggtaacaagagtgaaactccatctcaaaaacaaacaaacaaacaaacaaaacaaagaaggttgaatgggacataatgatttcctggctctgggatatgaagggggagaacaggagagaagagaactcccaggtgatgagggaggagtgggtttggtggaatgctgaagagctcagcctggactttccgagtggacatgcacatgagaagatccccaaaccactcaccgaggtgatggtacccataatggggtcttcatcatccattttctctggtctcccagctgcttgcttcctgcgggctttcactctaaggaaagaaaccagcacagtgcagctgggaccacccaggcacgggttagcgggttgtcccatcccatgctaagatggtgaaaatgacaatgaagccatccaggccccggaactaaactcggagaccttcctgacttcggagtgagggctccatcctcctggataaccagggatttggtcagggtggccatggactgaatttccatcatatagaccccctcttacacacaaaaccatggcaggaatggtcatagcagtgttatgcatcatagccaagaagcagaggcaacccaagtacccgtcaacagctgaacccacaaatcaaatgcgttccatttatataatggaatattatttgaaaacaaaaaggaatgaagtatcgatgcatgctacaacatagatgaatcttgaaaacattaggccgagtgaaagaagccagccacaaaggaccacatatcgcgtgattccattcacacaaagtacaactgcaacttcaggacagacaaatccacagagacatggaataggttagggctgggggaaagaagcaggagtgatagctaaggggtgcaaggtttctttatgtcttcgtttttcactttaggctgatgaaaatgttctaaaattgattttggtgacagatgcataactctgtcaatatacttaaagccattgactcgtacactttcagtggatgaattgtacaaaacatgtatctcaataaagctattagaaaagaaaaaaagaaagaagacctctctggatctactcagttctgctttttgttttgttttgtttttcttttaagacagggtctctcactctgaggcccaggatggagtgcattggcacaatcctggctcactgcagcctcaacctccatgatcaagtgatcctcctgcctcagactcctgagcatctggaaccacaagcacacatcaccacctctggccttagctctgtgtttctgagattcagtctctcctactccctacaaacaccaccctgtaccttccctgggaccaagacttacattaaaaagaagatgaggcacagacagatacagagcagggccatgacaccagcaccaccaagggctgcaggaaccactcctgtcccgaggttcgatctccctgcagaaaagaggggcgtgcaataactcactcccaggactcagactcttgtcctcccacctgctgggcaacttgctccagggccctgctcagacaggagatgaagaaccctgtctccccaccaccagtccagcctctctctcccaccatccatcactctgggatccatgcccctcccctcaggcccctgccctctgcaatacgccccctgaccttgcagcagcaggacagagccgctctgggacccatagatgttccaggccttgcagctgactttgaggtcggagctgagccccccgtggaggatcagggagctgttggcccagggcccagctgagctggagttgaccttgaatgagccctggctgctgttcccctccagcggcttctcctcaagccgccagcacagggagggggccggccgggctcgaaaggagcatctgcagtgcagaccctcagcctcccaggagcaggaggggcccagcaactgtgggagggctgtggggagggaggacagaactcagcagggggcctcttccttctttaataccatgcagttcctgctccagctgcccccacactcacagtaaactgagagattcagaaaaatttgcaggaagcccagcgggtgctgagcgcggcaggtgaagcctccttcttctgcagaccttactcgacgaagctccaagatcccggtattggagatgggggtggcgttcagggcaggggagccctggaaccagctcaggtgtgcaggggggttgctgggagcatcacagagcagccgcagagcctggccctccaggaccggaaggtatgaggtgttttgcaggatctctagggctttggggagagaagggtggggaaagagagatggggccagggaggctgacagtccctatccttccctccttcccaggatccagatgacatctccctctcctcccctggcctatgctggcttgattgcatcctggttcaaaggctgggcctttgcacactcaggaaactgaccaaaagtgtctgagtctcatgtctccagaggaggctcaatatctcactggtacatgcctggactgtggtggagagaggacagagagcccccggtggcgttgggaaatacagtccgctaatgtgacaggaaataagactgaggatgcaggagtggaagggtgagagaagaaccacagagctgggctgactgagatgagaggggcatggagtggtccttagtgactgtggaaagaaccagaccacaggagggatgggagatgggtggggtctaaagtctgttcactgctttgagcagagtgcatgagtgtgcacctgtgtgcgtgtgtgtgtgcgtgtgcgggtgtacgtacatgtgtgcgtgtgtgggtgtatctgcatatgtgtgtgtggtgtatgtgcatgtgtgcgtgtgtatgtgcatgtgcctgtgtggtgtatgtgtgtgtgtgcatatgtgtgtggtgtgtgtgcatgtgtgcctgtgtgcatgtgtgtgtgtatgtgcgtgtgtgtgtggtgtattgcatgtgtatgtgtgtggtgtatatgcatgtgtgtgtgtgcgtgtgtgtgtgcgtgtgtgcatgtgtgcgtgtgtatgtgcgtgtgtgcatatgtgcctgcacatggggctcacagaaggtggaagccagaaggcagtaattctcattcttgctcttcccaaatctgattgcattcaagctctgattctctacctctgctcagagacagacccagaggcaggtcccagcttcagagaggaggtctttcctacctatgccgttcctgaagatggtgatggtctgtggagcatctgggataaaaagatataaacttggcttcagcagtgaggagtgagatgggcatgggcccaggaggtacccaaagaggagccacagaaacccaccaagcggggaaggctgtcctgtctcactccccgcagatcccaaggcttagatccacacacaaggtttctcaagttattgttttgtttctctctgtcttccttacacacacacacacacacacacacacacacacacccctcactcccactgcccttgaggactcagctgtgtccccagcaccactcacaggagacattgagctggacagttctctccgtggtcacctgagctccttggcgtttcatctgacaggtgaggttggtgccatggtcctcgggcctgggggtgagggtgagctccgaggagcgggtggtctcggggtccagggggctgagggcattccccgtccaggagaatgtgagaggtggtcccgcttcacaggatcctggaaggctgcagctcagccttgtggggcggccggactccagaggctccagaaagtggatgtcgggtttctctatcagggctgaggaggagacagggagatacctgggccccaggggcttgaggacgtaaggtgtgaccccgagagtggccaggcctcaggccccgacctgccccaagtcctacacctcctccagccgcccctgcccaactcctgtccctgttctcatacgggggtctccacgtcccagggtcctctcctggggtccctgccatacctgtcacctccaagttcagcttattctgttggtagctatattttacatcccttcctctctccacgcggaagaaatagcttcccgtgtcctccattctggcatctccgatgctcagggagcagttcttcttctggacatccccaaggaggcggaatcggccctgggtctctggcttcactcttctgtctgggttgtttgtggccacaacctcagcgtagtatgggatctccccgtcccggaaccagtagacgtagagtgggggagaggaataccaggatctccaggggtaagagaaggagcagggcacaaggacgcacaggccctcctgcaccgtcaccgacttctgcacttgcagctcgtacactggcttctcctgcagggaccctggggggacacagaagctcagctgcagctccagccccccttctcacccctgtgcctgtccctcctccctcagctcactcacccccccacagcaggggcagcagcagcaggggcagcatgtctccatccgccagggccccagcccagtcccaggtccggctgtcagggaaggaaatgctccaaatgtccaaacgtggggtggggctgagaaagccccgacaggaagccggagggtgagtgagagctgtggacgcgcacagaaggggaacttgggcatcacgtgctgttggggtgaggcgggggctgggaagccattctgctcccaccccgactggacgccgcaggtgaagatactgaggcccccagacgatgtgaggcttgtccagctgaggatctggaggtgatcacccctcaaatgatgtttcagtcatgagtgagatcctcagggggctgaatgcagaaagaaaagagaaacaagggcttgtcctggtgatgaggtgagatgtcagaaccaccctccacctaaaaaccatgaaacattctggaaatacataattttaaatttgattttaaatgttcaaagtgaccaggcatggtagctcatgcctgtaatcccagcacttcgggaggctgaggtgggagggttgtttgagcccaggagtctgagaccagcctgggcaacatagcaagtcaccatctctacaaaaaataaaaactattagctggtgtggtggcacacctatagtctcagctcctccggggcactgaaataggagaattccttgagcccaggagtttgaggttgctgtgagccgtgatcgcactacggcattccagcctgggcaacagagtgaaaccctgccttaaaaaaaaaaaaaaaaaagttcaaaagggctgaaaaaaaatttttttgacccaaatttcgtggagggtcagagcatgagagagctgaagcactcttatgttaagaagattcttgggacacagcacagtccactttgggtcttgatggacctgagggtcttgtgggacggcagtgaaacacaagccctgctaaagcctcatcctattaaggagctacagaagcaaatttgccactgtgaggctgatgaagctcaatcttcaatgccctcccttgcaggatccacttttcagatgcccaggaggggcccacgcaatgtgtggaaataacctgccttgttactgctcttttatgaaagaaatttcataatagtttcccaaaatttaacaatatattaaaaatttttcacattccgattaatgtgttgtgagaataaagacagtttcttaaactatcaatgatcaaaacaaacgtcaaccacccatgccagaagaaataccgacttctctttctattctatctataaaaattgtattataaaattattctccaatattggccgggtacagtggctcacatctgtaatcccaagcactttgggaggaggaggcgggtggaccacctgagatcaggagttcgagaccagcctggccaacatggagaaacctcctctctactaaaagtacaaaaatttagccaggcatagtggcgcacacctatagtcccagctactccagaggctgaggcaggagaatcacttgaacccaggaggcagaggttgcagtgagccaagatcacggtactgcactccagcctgggtgaccaagtgagactctgtctcaaaaagaaaaaaattatcaccattatgaaggcaatcaaagaaaatcagtcaaaaatatagggaaaaagtatgcaggtgtagcagacaggtagactatactattaacaaacatagtatgccatttttctgagttgtctcatattttgacattttagattttgtgatttgatgtgttttctcagtccaaaaatcatcctatgtgtgccaaattttgtatttttgtatttttttttctaaagagtcacaaagactctcttcttaaccaaacttatgaaagctcctctgaacccttttttcaactaggctttgtccttgggactgccttgtccagctgtagcaagaatcctgctaagttggttttgcaagactcttgatatctgatcgccttcactatctgatcaaattccctagccctcacccttggtatctgatcatgctggcctgctttcagcaagaatcctgttaagtcagtttagaaagaatcccggtatcttcagtgtctcctcttagtagttttccgtccactaacacacacggccagcctccctcacctgctgcactatgcttcttgcccataaacccccctggtctttgctgtattccgagttgagcctgacctatctccattattgcactagtctttttttttttttaattgacttctgtttttttcttctgagacggggtctcactgtgttgtcccagctggagtacagtggtgcaaccttagctcactgcaacctccccctcccaggtacaagcgattctcctatctcagcttcctgagtagctgggagtacaggtgcatgccaccatgcccagcttatttttgtatttttagtaaagatgggggtttcaccatgttggccaggctggtctcgaatgcctgacctcaggtcatttccctgccttgcctcccaaagtgttgggattacaggcatgagccactgtgcctggcctgcactagtcttgatacctgtctcagtcatcctgaatagtcaatgttaacaggtgtcagaataattttttcttttttctttttcttattgcaaattctgaactttattcctcatttgaactgtgaaagtaattcatcataccggctagtaggatctaaagataaagacttgattatgtaggaaaatggtatttttatctttatattaaaatcttaatattaaattccctctcctaaaatacatagtatggcttctgttttcacatcagccttaactaattaaatctcaagagatgaataagtgagcattgggtgatttcaaatccctttatgatataattcatagccaactagaaattctctttagagaatttcccaaacaagataaagggtgtcttcagcaaacatcatatacctaatgaagtagcttcaggtcctagcataataaggcaataaaaataagcaaaaggtacagcaattacaatgaaattttaacagaggtctttatcaatgacatgactgcacatatagaaaaatccaggctaagcgtggtagctcacgcctgtaatcccagcactttgggaggctgaggcaggcggatcacgaggtcaggagatcaagaccatcctggctaacatggtgaaaccccatctctactaaaaatacaaaaaattagccgggcgtggtggtgggcgcctgtagtcccagctactcgggaggctgaggcaggagaatggtgtgaacctgggaggtggagcttgcagtgagtggagatcacaccactgcactccagcctgggcgacagagcgacactccatctcaaaaaaaaaaaaagaaaaatccaaaagtatatacggatacatttgaagccttaataaaatatttgcaagacagccagagattaatcaaattacaaaatcagttgtctttccacatcacagtaataaaaatggaattttataaaaatgccattgacaaaagcttcaaaaattatgatataatttatcaatatcaaaaaatatgatataatttttgaatatatggaatatatctaactattagagatgtatctaacaaaaatatgtatatgtcacctctatggaggaaattataaatctgtattcaaggacattaaagatgtaaataggctgggcgcagtggctcacgcctgtaatgccaacactttgggaggccgaggcgtgtggatcacctgaggtcaggagttcgagaccaccctggccaacctggtgaaaccccatctctactaaaaatacaaaaattagctgggtgtggtggcaggcacctgtagtcccagctactcagtaggccaaggcaggagaatcacttgaacctgagagatggaggttgcagtgagtcgagattgcactattgcactccagcctgggcgacagaccaagactccgtctcaagaaaataaataaataaaaaataaataaatcaagatgtaaataaactgaaaaagaggccatgttgatgagtttgagaacaatattgtatgaatgccaattttacccaacaatctacagcatcaaaggaatatgtcatacaatctcccgggtgatttttgtgcaatttggtaactctattgtaaaatttatactgaagtagaaatgttcaagtatggtcaaggcaaccatgaagaacaatgaatggctttgcaagataaaaagatgtatcataacattacagaaaatatgaccatttcagacggggcacagtggctcacatctgtaatccccgcactttaggaggccgaggcagatggatcacttaaggtcaggagtttgaaagcagcctgaccaacatggtgaaaccctgtctctactaaaaaataacaaaaattagctgggcatcgtggcatgtgcctgtaatctcagctgctcaggaggctgaggcacaagaattgcttgaacccaggaggtggaggttgcagtgagctaagattgtgccactgcattccacccagggtgacagagtgagactgtctcaaatttttaaaaatgtgagaaaataggcccatttcaatggttcacacctgtaataccagcgctatgggagaccgaggcagaaggattacttgagcccaggaattcaagaccagcctgggcaacatggtgacaccccatctgtacaaaaaacacaaaaattagctgggcatgggtggctcatgcctgtagtctcagctacttgagaggctgaggtgggaggatcacttgagcccaggaggtggaggttgcagtgagccaagattgcagcactgcactccatccaaggtgacaaagtgacacagtgagaccttgtctgaaaaaaaaaagtgacaattatgtattgaccaagtggaacaaaattgagtgcctggaaatagacctcaaccacaggaaacatcaagtgtgatagaggaagtggcaaataataaatttttctttttatttattttgggtttttatttatttaattttttttgagacagtgtctctgtcacctaggatggagtacaatggtgtgatcagggctcaccacagtctctatttctctgggctcaggcactcctctcatctcagcctcccaaatagctgggactacaggaatgcaccattatgcttggctaattttttaattttttgtagagacaggttctcactatgttgcccaggctggtctcaaacttctgggctcaagcggtcctcccacctcaacctcccaaagtgttgggattacaggcatgagccactgggcccggccaacttttcaaaaaatatctgtgggcaaaacttaatgcaatcaagtttgcagtaagtttgcaatgaaatttgactcccagctcatgcataaaagtcaagtacaggtagcttgaaggtctaaatatgacaaagaaaacaatagagctgttagaaaataatatagcaggaaatcgccatgaatttgaggtaggtaggatttctgagcaaaacataaataacactatttatttatttgtttatttttattatttattattattttttttgagacagagtcgtgctctgtcacccaggctggagtgcagtggcgtgattttggctcactgcaacctccgcctcccaggttcaagcgattctcctgcctcagcctccggagtagctgggactacaagcacaccccaccacgcccagctaattttcgaatttttagtagagacggggttttaccatgttggtcaggatggtctcgatctcctgacctcatgatccacccaccttggcctcccaaagtgctgggattacaggtgtgagccaccacgcccagccaataacactatttataaagagaaagattgaaaacttgacccctggcccagacactgagctctacctctctgaggtcttgcctccacaggacctgcacatccaaaggtcttttctccccaggaccctgacatcctactccagctcccataagccatgctaaggaggctgattctctccatgtttctctggcttccaaaggggaaaactgaagggcacctgcagagcacctgaagcccagaagtaaaggtgaccactgagacaaggagtgaggtagcagtcatgggtctcaggtccctgaaaggagaaggcagcacctttttgagagaaggtaatgggtgtttcctctccatttggctccagggtcccttcggagtgatgagtaactccatgtgtggtcccaccctcatctccacctcttgttgctcactcttggagaacttgtgcccctgtcactctcacagtgactccttaggtaaaaggtttatgttctaccacatcctcttaagatatatctcccactaactcccatctggaatcccccagtgctcagagaagagttattgtcctgggagcaactgaggaggtgacattgatcttgggaattctattttttattttcaccctctctttgtgatcgatcactagagaacagttaccacgtgcctggctgcagtgagttttaggattccaggatcccaggtgtaggagaatgtacaaaacattaggtcacttgtttccttgggtgagagacagagatacctgtagggccagccccaaaccccacctggtcctctcaagcatttgtcccactcaacactagaggcatctctcaagctggagatcccagatcttgccctgggacagcttcattcccccaacccccatcctctgtgctgtctattaagtgcaagaaacaaatggggtgagagaagaggaaattgcaaccagaagccacaagatatagacagaagggcagaaaaggaaatttccccacagcctctaccaggaaatctgggccccaagggcaaggaagaggccaggctggcccacctcaggggcacaatgcccattctaataaaagtaaagtaacacaaaatacagaattggatgtaagaaggaaaaaaagaattgaggtaaagaaattaccattttcacattcaagaagggctacagagtttgcctcaagagaaaagtgtgtatatagtttatcactactttgttttcaaattaaactggtgataatattttttattgaggtgaaattcagacgaaaaaattactagtggtaattttggatgtataaacttttgaaggatgaggtgaagaggaagctaaaatgatgctggataaaaaaaggaagatgaacgttaaggctcccccttgtggaggatagagaaagcatttttaaaagttctggattcagtggcaatgagatgaggatttgggggatgacctcttggactcaacaacgtggtactaggacacaaaatccagtgaaagactttctgtggtggggatgaatggtgaatttttgcaacacgatgtctagcatccaatttaacctacttcttatcctgaagagccattcctttctgctgctcccaaaccttgaatgaagagtgctacccaaaatatacttgtacaaagtgctgggaaaggcaggaaagaagtctttgttctcacgtttggggaagggataccagcttgcatatgtcaatcacccatcaccctcaggaactctcccacatattgtggtaagttggcagctttgggttctctgtgattattaagcatgagagatccagttactttctggggatcttaaaatctgaacaggatgcaagatttgggaattactggtttgtaccatcaaaacttaaatctgctcttaaactcttggaatatatcagcctggtgcagtacaattttaacaaattcaaagcaggagaggaggagctgagaacaaagttacaacctgtgactgagttgatggtatgataaattgaggcaggaattatgtggaggcaattatgaaggactccaactaggagaggtgtggactgagagaacaccctggtagctatgaagtctttacttttgattgggcatccattggatagatatattcagcttacatttctattatatttgattgaaagtgttgacaaaaaaaagttttattttggtaaaataatgcataacacaaattttaacattttaaccacttttaaatgtatggttcagtggcactgaatatattcatcttgttttacaactgtcacaaccatccatttccagaactttttcatctttccatactgaatctgtgtactcattaaacactgactctccatttccttctcatcccagcccttagcaagcgtcattctactttctgtatctatgcatttgactatctcagtatctcatataagtagactcttatgacatttgtgcttttctgtctggtttatttcacctagcataatgtcttcaaagtcatacacattaaagcatttgttagaacttcattccgttttaaagctgaataagattttatttgatgcatactacattttgtttctccatttatccactgatagacatttatgttgcttccatgttttggctattgtaaataatgctgctgtgaacattggggtacaaatatcagactccctgctttcaattctttggggtatctactcagaagtggaattgtggaattgctgaattacatagtaattacatgctttgtttttcgaggaattttcataccatcttccatagtgactgcaccattttacatcccaccagcaatgcacaagggtttcaatttctccaaatcttcaccaatatttgttattatctggttttgttttgttttttaatagtggtcattctaacgtgtacgaagtggtatctcataatggttttgatttgcattcctgtaattattactgtttataaaattgtataagtatttatgtgttggaaattataaattagttttcaatatttcaatattgagaagtgttaaaataatatgaacttactcaacttacctttcaaaattggaagatctagcactccccttatgacagtgattaactggggatgaacaagaactgcctcttttactttgccacactttctattctgtactttggtggttcaagctatctcttccaatgaaaattacccaaacaataaagaggggaaaaacataggatggaaaagataaattgtctcagtccatttgggctgctataacaaaataccttaggctgggtgatttataaacaacagaaatttatttctcataattctggaggtcgggaagtccaagatcaaggtgccagcggattcagtgtctggagagaattatttgcttcccagatagtatcttttcgtggtatcctcacatggcagaagaggaaaacacacttccttctgtttcttttatgagaacactaatcccattcatgaaggatggcaccattatgggttaatcactttccaaaaagccccaaccttttaataccatcaccttgaggtttaagatttcaacatataaattttgggaagacacacatttctattatagcataaataaagtatatcaagagttaaagcatatagaaaaaaagcaaatattgcactctctttgctacatgcacttagggaaattaaaagaaaaacacctgaagtttataaaagttaaattcatgaaaaagaatgaagaaattataaaagcagcaagacataaacagatattgccttaaatggaaccacaataagaaaatgatgactgaattgtcatgagaaactcacccgccctccaaagtggaatgacatctccaaaaggttaaaagaaaaatgcaaagctagaattctacattttggaaaattatccttcaaaacgaaagagaaggagtcgtgcttttattatgaaggagtaagctcctagcagagtgaactcaccacaacacaacaaaacaaacaaacaaaaaatccttacaagttataagctttgaatggggaaaaaaaactacttgggaaatgggataaaagaaaatagattctggaacgggagtcaatatttggggaaaggcaccaacaaggaataaatagctttattccaatggtaggtcagagctacagtgcagaaagtggctgctaaaattctaatacaactccttccatctttctggactgagaaacaagggatgaagcccagggcaactaggaacactgaaacaacaggtaacaattctggaaagggaagagctagggaaaaggaactccagcttctgagtataaatgctttccatttcaaatataatgaggtgaggctaggacttaaaggatgtgaaaatgcatactatgcaaatactagtcaaaagaaaactggaatggctatgttaatagcagacaaagtacacttaagagcaaagaaaatcacaggaacaaaaagtgatgttacataatgtaaaacagttgattcagccaactgcggtggctcacgcctataatcccagcactttggaggctgaggcgggtggatcacctgaagtcaggagttcaggaccagcctgacttacatggtgaaaccttgtctctactaaatacaaaaaaaactagccaggcgtgatggtgcgtgcctgtaatccaagctatttgggaggctgaggcaggagaatcacttgtacctgggaggcggaggttgcagtgagccaagatcgcgccattgcactccagcctgggcaaaaagagcgaaactctgtctcaaaaaaaaattttttttaagttgattctttaagaagacatgagaattcttaatatgtatgcacctaacgacagagtttaaaaatacatgcagcaaaaactgatgaaactgagaggagaaactgacaaatccaacattaggatcagagacttcaacattcctctctcagtaatagactgagctggtagacaaaaaagttaccagctataaaactgaacaccattggacaactatgtctaattgccatttaatattcgtcccataacagggcaatacacattctttctaagcacacatggagcattcaccaagatagaccagtgtcatcaagcaaacttaaccaatataaaagactctcacggttggtgaaagtgaaagttagttcagccattgtggaagacagtgtggcgattcctcaaagacctaaacatagaaataccattcgactcagcaatcccattcctaggcatatacccaaaggaatataaatcattctattacaaagacacatgcatgcatacattcactgcagcactattcacaatagcaatgacatggaatcaacctaactgcctatcagtggtagactggatagagaaaatgtggtacatatacaccatggaatactaagcagccataaaaaagaatgagattatgtcctttgcagggacatgagtggagctggagaccattatcctcagcaaactatcacaagaagagaaaaccaaataccacatgttctcacttgtaagtgggagctaaatgatgagaacacatggatacatagaggtgagcaacacacactggggcctttcaaagggtggaaggtgggaggagggagaggatgaggaaaataactaatgggtactaggcttaatatctgggtgatgcaataatctgtacaacaaactcccatgacactttacctatgtaacaaacctgcacttgtgccccctgaacttaaaagttaaaaaaaatcatatcaagcatgtgtatttattaaaatggaacttaaaaagaaagtagtaacaatttgtttaaaaataaaaaaccagtaaaatctgcaatcacttagaaattaaacaacacacttctaagcaatccgtgaattcaaaggaaatctcaggggaaagaaggaaatattttgaactaatataaaaatacaacataacaaaacttttgtggtgcagcaaaagtgattaaagggaaaatgcagaaccagtggatacagaaggctgactgtacgatattaaaagcaaaaaaaaccccaccaaaactgagaatgagctattgatacgtgtaacaacgtggataaactgggaaaaccacactgaagaaatgaaagcagaccctaaagcaaatatgtttggttccagttatacgatgcacagaacctgacaatacaggtattgccttcttgtatatggacagaaggagaatcacttgaacctgggaggcagaagttgcagtgagctgagattttgccattgcactccagcctgggcaacaagatagaaactctgtctcaaagaaaaaaaaaaaagacataatttttgtctacaaactctcacagaggcattaaagagtaaaatcagttatgttgtattgtttcataaaagttttacttattttgtaacaattgtattggataataatcacaatgaggtagagttttaactggaaaacaaatgctgcctctctgtgcctatatggatagggaagctgaggagaccagaaattcaagtgttaagaaggtaacttttggcagccaggcacggtggctcatacctgtaatgccagcactttgggaggccaatgcagtggattgcttgaggtcaggagttcgagacctggccaacatggtaaaaccccatctctactaacatacaaaaaaaaaaaattaactggatgtggtggcaggcacctgtaatcccagctactagggaggctgaggcaggagaattgcttgaaccccagaggtggaggttgcagtgaacggagattgtgccactgaactccagcctgtgcaacagagtgagactctgtctcaaaaaaaaaaaaaaaaaaaaaaggtaacttttgggtaatgggtaatgggggtataagaccgaaagtacattcccttcacagggctggagatggtggatggagagggaagagaagggcaggtggagaggggatggggtgcagatggggatgcaggtgtggtggggcaagactcacaagcagaggggaataagtagaaggggtatggggcaggaaggaaaagaggggtagtcagtgggatgtgagcttccagaaagaagctgacagtgatgtcctgcatgtgtcccacagggctaagtgtccacacctcagttctgtcttgagcgggaggggctcagccaggcctctcagccctgctctgctgggggcctccacacctgcagagccaacatgggcctcagatcagcaccagccacttcagttctaattccaggtggggctgagctgtcctggggcaggacagctcagccccacctggaactcaggagcttcctggagacaggcagtccggctcacctggtatagtagatccaggtgaggccataggtgaggaggaagccagcccccatgagagcccccctgatcagggtgaggacgaggggccaggagccctgctgtttctcagttacacatatgcaggaagaggagcttcctgggagaaaggagaaggtaaggtgctgttaccaggcctcagtccctcccaccaacctgaatacctcaccgggctgtctaccctcagcacctgtcctgcaactcactctgcacagaaaggatgaaggacaggtgctgggagcccagcggatgctgaacccggcaggtgaattcccctccctctctagctcctatgttaggcagctccagggtcccagacattgaggtctgggaaggattgagggcttttccctcccggaaccagctcagtgaggcaggggggttgctgtcaactgtgcaggcgaggaacagggactggccctcctggatgggcaccgacatgccattgctcaggatccgcagggctgggaaagagaagcacagccaggtgagtggagctgggaggcccaattctccctcattcctcccactgagctgcaagaagaaagacaagactgtgtggtgagtgctgagaatgggctagtcatgggtgaaaggatgaggacttggtgatcaggtcaggctaccagaaagaaggtggctgagctgagaaaagacagatgaggaggagttctcacattaaggagaagtggatgggcagctcaggtgcagacgtgccaagaactgagacaggcagacgaggaaagaggctcctagatccgcaacctgtcagggaggacccagagctcccaagacacgataatggaggtagaagcaggctcagatcttttggagcattgggtgccagattgagggccttgggctttatcctggaaagcaagagggggctataagcaagggaaacagagttagcactggatctagaaagatcctgctggagccaagtaggtcccggactggagagaagtgggataggaggcagggaggctgggaggaggctggggcaatgggccagggttgagcacgagacttgagctgggcctggaaccaaggggatgaggagggaagtgatgattggtgaagtaaaggtgttaagacttgcggactcatgaaacagctgatgagaaagggtgctgtctacagcgatgtccagaacagccctgggatcaacagggaaggaggagccgagaagcatccgagggaggtggctaaatgtgcagatctgtgcctcagagaaagggctggatataaagttgtgggaggcatcaggacagggtcaaggagagatcggattactcaggaatgtggaggggaagaactgggttctgggacagagctgtgggaggtgggaaagtcgaaggctcccaaaaaggacgatcagttagagatgaagcagggcatgcatcagaggacatcggagcaggcagaaattcaagaaaagggaacagcgtgtcctgagtactcaaactcacagagacagaaaagtagaatggtgactgctcggtggcaggagggggaagtggaaagtcgctgttcagtgggtacaaagtttcagttttgccagataaaaggagctctgcagtttggttttgcaacaatgtgaacacatttaacactgctgaactgtactctttaaaatggctaagatgacaaattttgtgctatgtgtattttctcacaatgaaaaaataaatctgaaaaagagagcagagaaaagggagaagccaaaagaaatactaggtctgttcgtgcaagatcttagtgactgggattggggggttgggagcaggaaggacccagacccaggggctgaggggtgagggagggtctcctctcccaatgctgaaccctgagctaatagaaggctcccatcacagccccagagggaagagggtctttcctacctgtgcctgtgccatttctgaagaagatgctgatggcgaggttctgtggagcatctgggatagaaagatacagcaccagcttcagaggtgacaagagggatgggcgtggtcccgggagggacccaaggaggggccacagaaacccaccaggtggggaccgctgtccttcctgcccacacacgagttttccctggttatcattctctttctctctctctcttctacacacacacacacacacacacacacacccccctcactcccactgcccttggggactcagctgtgtccccagcaccactcacaggagacattgagctggacagttctctccgtggtcacctgagctccttggcgtttcacctgacaggtgaggttggtgccatggtcctcgggcctgggggtgagggtgagctccgaggagcgggtggtctcggggtccagggggctgagggcattccccgtccaggagaatgtgagaggtggtcccgcttcacaggatcctggaaggctgcagctcagccttgtggggcggccggactccagaggctccagaaagtggatgtcgggtttctctatcagggctgaggaggagacagggagatacctgggccccaggggcttgaggacgtaaggtgtgaccccgagagtggccaggcctcaggccccgacctgccccaagtcctacacctcctccagccgcccctgcccaactcctgtccctgttctcatacgggggtctccacgtcccagggtcctctcctagggttcctgccatacctgtcacctccaagttcagcttattctgttggtagctatattttacatcccttcctctctccacgcggaagaaatagcttcccgtgtcctccattctggcatctccgatgctcagggagcagttcttcttctggacatccccaaggaggcggaatcggccctgggtctctggcttcactcttctgtctgggttgtttgtggccacaacctcagcgtagtatgggatctccccgtcccggaaccagtagacgtagagtgggggagaggaataccaggatctccaggggtaagagaaggagcagggcacaaggacgcacaggccctcctgcaccgtcaccgacttctgcacttgcagctcgtacactggcttctcctgcagggaccctggggggacacagaagctcagctgcagctccagccccccttctcacccctgtgcctgtccctcctccctcagctcactcacccccccacagcaggggcagcagcagcaggggcagcatgtctccatccgccagggccccagcccagtcccaggtccggctgtcagggaaggaaatgctccaaatgtccaaacgtggggtggggctgagaaagccccgacaggaagccggagggtgagtgagagctgtggacgcgcacagaaggggaacttgggcatcacgtgctgttggggtgaggctggggctgggaagccattctgctcccacccccactggacgccgatggtgaagatactgaggcccccagaggggcttgtccagacttgtaagtctagactcctgaggtcaccaggtcccatagctgcagcactttccttatgcacctttgtctacataggaaggagaacaccacttggccagctccctgggagtcagggcctcgggaccctcagcgagatgggagaataaatcctttatgacatgataggagctgtggtgagggaagcacacgctgggggtttcaggtggggaagactttcctctttccagagggaaggcaagttgtcagggacaaacacatcaggtggacatgaccgggtccttagcagtcaagagagatgtggtccccaccaccagttggatttgggaacctcatctcatccttgtccttgtcccaggcagcgtcagaccccatccctgatgttgacagccagatgaggcttgagagccgggcatttgaaatgtgaacgttgaggatatggaataccaagtgtgaacccagacccctcacctaccggctgttgaactttacaaaagttacctaccctctctgtgcctcagtttgctcagctgaaaaatgcagacaataatagaattgctgtgtggggattcagtgaggtctcatgtgtaaagtgcttaggacagtgtctggccccgagaattcactcattcaactgatgcttcatgggcgcctatggtgcaccaggccccctgttttaggagctggagatacagcaaaggataaactcttaggatgagaaggtaagtcaaaaatcctagtgggggctcctctgggcacactgcttatgcatacccctgctccacgaagaacagtaaaaaaagaaggccgggcgcagtggctcacgcctgtaatcccagcactttgggagaccgaggcgggtggatcacgaggtcaggagatcaagaccgtcctggctaacatggtgaaaccccgtctctactaaaaatacaaaaaattagccgggcgtggtggcgggcgcctgtagtcccagctactgggggggctgaggcaggaggacggcgtaacccgggaggtggagcttgcagtgagccgagatcgcaccactgcactccagcctgggcgacagagcgagattccatctcaaaaaaaaaaaaaagaaaagaaaagaaaaagagaaaataaaataaaaatcctagagggaagacaaacatttaatatgaaattaaaatacacagtctgctaaagaataatatattctaagaaaaaataaaaacaggaacacagaagaggaatcagtgaggactgataatttttttttttttttttttttttttgagacggagtttcgctcttgttgcccaggctggagtgcaatggtgtgatctcagctcactgcaacctctgcctcccaggttcaagcgattctcctgcctcagcctctcaagtagctgggattacaggcatgtgccaccacacctggctaattttgtatttttagtagagatggggtttctccatgttggtcaggctgggctcgaactcccgacctcaggtgatccgcccgtctcagcctcccacagtgttggtatgacaggcatgatgataaaattttttacagcatggcttggggggccacttggaggagatgacatttgagtaaagatgcgaagggcgtgtgggaatgagtccactggtatccattccaagggaaccgcacatttaaaagtcccaaggtaggaacacacgtggtgtgcttggaaaatagccatatgccagcattgaggggtgatcagtggggaagatggtaggagggtaggtctgggaggtgtcctgggtctgatcatgaagagatttgggagctctcataagaagttcacttttttcttgtccagctggaactatggaaggtgtcaaagagaggaagaagaaaaagaaggttcctgctgtgccagaaacccttaagaaaaagggaagcaatttcacagagctgaagatcaagcccctgagaaggaattttgcccaaaagatgcttcgaaagacaaggaagaagcttttctaggaaaaagcgaagcactatcacaaggaatataggcagatggacagaactgaaatttgaatgcaaggaaggcaagaaaagctagcaacttctatgcaactgcagaacccaaattggcctttgtcatcaggatctgaggggtcaatggtgggagcccaaaggtccgaaaggtgttgcagcttcttcgccattgtcaactctccaatggaagctttgtgaagctcaataaagcatcaattaacaggctgaggattcagaaccacatatcgcatgggggcacccaaacctgaagtcagtaaatgaactaacctacaagcgtggttatgacaaaatcaataagaagcaaattgctttgacagataacactttgattgcttgataaatatgtaaatatagcatcatctgctatataaggatccaattcatgggacctgtactgctggaaaatgatttgaagaaataacttctcgtagcccttcaaattatcctctccacaaggtagaatgaggaaagagacaacccattttgtagaaggtggagatgctggcaacaaggagcaccagatcaacaggcttcttagaagaatgaactaaggtgtctaccattatttatttttctaatctggtcagttaattaacagtacccactttcaaactgaaaacaaaaacctgacttttgctgagtgtattagccagggttctccagagaaacagaatcaacgggatgtgtctgtgtgtgtgtgtgtgtgtgtgtgtttattataaggaattgactcacacaattattgaagcagaaaagtcccaagatcctcagtcggcaagctggagacctgggagaactgacggtgtagctccagtccacaagcttccaggctggagatccaggaagagccaaagtttcagctctagtccaaaggcaggaggaaactcaggtcccagcttgcaggtagtcaggcaaaaggagttccccttactcacaggagcgccaggctttttgctctatccaggccttcaaccaactggtcaaggctcacccaccctggggagggcaatccactttactcaaagtctactgatttaaatgttaatctcatcccaaaacaccctcacaggaacacccagaatagtatttgagcaaataccagggcactctatggccctgtcaagtggagacctaaaattaaccatcacactgagcaaattgtgaagacaggggttgaacagagaaggggcaggattttatttgtttttacctgatcactctgcttgctttcctgagactagactctgctgagccattgcaatgcttgggaggtgagaggagggtgctcaggtctccaaggacacagtggaagtggtgagaagagggggagttaacagtatttgtcaacagattggacacacatgggaagagaaaggaaagggccacagataatgcttgtttttgacctgagatgttgcaggcttgaagctgccattgagagaagaggaaaagacttcaagagaagaatcgggagctcagcttgggacacgttgggttagatgtgcttattagacatacaagtggaaggaaaaggaaaggggttagatctgtgggtctggaatttaggaaaaataggaaaaagttctggctggagacaaaagtggggtcattcatgttcaaagagtgtctgtagtcatgagcctgagtgacatcacaaagagcatgagtttatttatttatttatttatttatttaagacatggtctagctgtcacccaggctggagtgcagtggtgcagtcatagctcactgcagcctcaacttcccaggctcaagcaatcctctcaccttgagtagctgggactacatgtgcacatcaccacgcctaactaatttttttttttaagtagagatgaaggttccactatgtgccccacgctggtcttgaactcctgggctccagtggtcctccggccttggcctcccaaagtgctgggattataggtgtgagccacaatgcctggccaaggcatgagttcaaatgaaaaagggacagagaccatctccagggcttccatgatctggatatcacacccactttcccactgaaaataactaaaaatacagggaagataattaatgcaagtcttctttaaaccatggaatggctgacaagagagaaaagaatttacagtcaaaactgtaggagatggcgggaaccaagagagggaagcagagcaccaaagtcacacgtgccctccgggaattttaaatgtggggaacttgaatttggggtttcctagacctgaggatgagagtcagactatgcaccaggtgtaggggaagtgcagggttcctggtcactctctctttctgcacacccccaggctctgtctagggaaatgaaactcaagtgcagccaaccccactctccgcccccatccaccctctgactgctgccccattcaatggcagggaggccagaagcatctctaggctggaggagacccaagtccctgccctggaatcacctcattctctaaccccatactctgattcatctactaggagcgggaacgcagaagagataagtgagcgggaaggaagttgcattcagaagatacaacacatagacataagcactctgattcaatagaagaggaagtttccccatgatgtctccagcctgggtccccagccacccttctgagagtatctgagttgatgtggaaatatgaacacaacaccacgctcttggtgtcagatctccagctccaatgctgagtccaatgtacaaatcttgtaacccttggcagacttgccctcatcttcacttcctcctctacacttttgggttttccaagtttgagggaaaggcagaggtctccaatggctctgatctcctatgcagtggtgttattatttgtttgcttgcttatttgttgactgcccacaacccagttcttcacccatagccctattttattttcctttggagaactaccactatcagccccatccctcacttcagcggggagtctgtgaattgtgcagggagcactgtccaattgacatagctcatcaccaacaatgctgcggccaattttaagaacaagcccgtgtccaattgcctctaaagatccaagttccaggatttttgccacaccttcaggaaaaatagctgttcagtttctcccggcatccctgggtggaagaaatgtaagcctgcagctgcctgagaacaaagtcaacagaggaaggaagaactctagggttaacaaacgacaaaaaaggattttagagacatcaaccaattctggaacctgctgtgcctgaagccggtgtacttcagaacttttcggctaagtgggccaatgcttggcttttatttcccaataggcccatttgagctagattgatcttgcttgcaccccaaagagttctgcctgatataacctctcccctagccactgtgttccacttcccctcagctactctgcgtcagaccctgaagctgccaaaagcctccctgtgagacttgatctcaatttcagagttcacaacccttccatgacttttgggaaagatcctgacatgtgcccctcccttataacaagaccctctgtgacagccatcaacataaagtcaattaccaggcctggtggcatgtgcctatagtcctaactgttctgaaggctaaggtgggaggattgcttgagcctaggagttcaagatcagcctgggcaatgtaatgagaccctgtctctacaaaaaatttacaaatgaggattaataaccagaatacgtaaggagctcaaacaactctaggacaaaatctaataatccaaccaaaaactgggcaaaagatctcaacagatatttctcaatagaagacatacaaatggcaaacaggtatatgaaaaggtacttggcatcattgataatcagagaaatacaaatcaaaattacaatgagatgtcatctcatcccagttaaaatggcttatatccaaaagacaggcaataacaaattctggcaagggtgtagagaaaagggaatccttgtacactgttggcgggaaggtaagttaatatagccactgtgaagaacaattttgaaattcctcaaaaaattaaaaatagagctaccatatgatctagcaatcccactgctgggcatatacccaaaaggaaggaaatcagtatacggaagagatatctgcactcccaagtttattgtagcactgttcacaaaagccaagacttgaaagcaacctaaatatccgccaacagatgaatggataaagaaaatgtggtgcttatacacaagggagtactattcagccatgaaaaagaatgagatcctgtcatttgcaataaccatggatggaactggaggtcactatgttgagtgaaataaaccaagcactgaaagacaaactttgcatggtctcacttattggaggaaactaagaattaaaacaattgaactcatggagatagagagtggaaggatgggttaccagagactggggaggatagagggcatgggggaggggagaaggtggggatggttaatgggtacaaaaaaattggaaagatgaaatgagacctcatatttgatagcaccacagggtgattatagtcaaaaataatttaattgtatattttaaaataacttaaaaagtataattggattgtttataacacaaaggataaatgcatgaggtgatggatacttcatttaccttgatgtgattgttacatgttgcatgcctgtatcaaaatatcttgtgtaacccagaaatatatacacctactatgtatccacaaaaatttaaaaacttaaaaattaaactaaaaattaaaattaaaaaatacaaaattagccaggtgtagtggtgcatgcatgtagttgcagctactcaggaggctgaggcaggaggattgcttgaggccagaggtcaaggctgcagtgagctatgatcatgccactacattccagcctggacgacagagagagatgcaaccctgtctccaaaattaattaatttattaattaataattaaaataatcaaaaccagttgtaaaaataaagaacaactaaatgagaacaaggaaaggctatgtattcagttcttgctatgacaagagagtcagccaccattatttgtgttctggcagagactcacaggcaggcagtggagtgggagagcttcatagtggggaaaagagaaaacttcaggtgtgtcctgattggaggctattggcctggggaagctgtaggtgagccagctagaagcaggtaatcctacatgattgggttaagaaaccatatccactttctctgatttggtcctaagtagaaagtggggacagaaattagggaagctgtcagttattaatcaagtcccaggccaatttagggccaatcgttacagggattattgtttagcttcctggacaggttaccagagacaagtctggtttatagagagtagcctggcttcctgagctggtgactgtggatgatgggctggcttttcacagctggttgctgcaaattaggagtcagagttctagttttatatatgatctggccatttctgcatgtatattcaggctctcacagggtaggagagcaattttccacattcaaaaagagatacaaaatttatttcagggagaagacctatatacttgtttttcaaaacaaatcgatcacctttttgggtgtctaaacagtaagcccaggactagcctggagggtgagctgaagaacaggctaaattttctctgcataatagaataatgtgaatcctaagattgtggctgagagagaaaagacagcaaatgtcctggtcttgatggcaatggaagtggtggggacatgagctggtgttctcttttgatagatgggaccccagcagcctggtgacagcagacatacagccggtaccaggttctgtggcgtggagatggatggtggagattaatgtcccatgtaggttgctctgttagggctctgcctactggacctggtgagctcagcatttttgacacgtcttttgggaccattcactactgctttccccaaactttctgtatgttttacacaatatcactggattaagaggaccgaggaatgcaagaaggaagtgtttgttcccatgtcaggaggaaagaacagcactgtgcaaatgacaattaggagaataccgttatctaccgtaatcttcccaaataatgtacagggtgggaagtttgggattcactgtacttctgtggcttgggttccatttatttcctttagactttaaaatcctggaagggtgcagcattgggggatctctggtttgcaccctgcacaatgcaaaaatccttgaggatatcagtttggtatcaccatcatgtggacatcattgaaggtagggaaggggaactgagaacaaaggcagaacctccccacccccctcccccggcccgcgtctgagaatgtgaaacaatgttgtgaagctgaagtatggacaggaaatgatgaaggactccaactagcataggtatagaccacaggaaggatgggatacatgtttgaacagtggtggcatcaaggctgaagaagacaccaggcacctgtaaagagtctctctcctgaggcaggtggatcacttgaggacaagagttcgagaccagcctgaccaacatggtgaaaccccgtctccactaaaaatacaaaattacactttgggaggccaaggcgggcggatcatgaggtcaggagatcgagaccatcctggctaacatggtgaaactccgtctctactaaaaatacaaaaaattagccaggtgtggtggcgggtgcctgtagtcccagctacgcgggaggctgaggcaggagaatggcatgaacccgggaggcagagcttacagtgagccgagaccgcgccactgcactctagcccgggtgacagagcaagactccatctcaaaaaaaaaaaaaaattagccaagcgtggtggtgcatgcctataatcccagctatttgggaggctgaggcagaagaatcgcttgaacctgggagacagaggttgcagtgagccaagatcgcaccactgcagtccagcctgggcaacaagagtgaaattccatctcaaaaaaaaaaaaagaaaagaaaagtccctctccccttgacttggcttccagtgagcaggcagggtctggctcctcttcgcattttgtttgactgggatggtttggaaatatttaactaatttacaccactaaaatattgggccgggcacagtggctcatgcctgtaatcccagcactttgggagccgaggtgggcggatcatctgaggtcagcagttcaagaccagtctggcccacatggcgaaaccccgtctctactaaaaatacaaaaatagccatgtgtggtggcacacgcctgtaaatccagctatttggtaggcagtgagcatgccactgcattccagcctgggagacagagcgacactttgtctcaaaaaaaaaaaaaaaagaaagaaagaaaagaaagaaggaaaggaaagaaagaaagaaagaaagaaagaaagaaagaaagaaagaaagaaagaaaagaaagaaggaaagaaaagaaaaagaaagaaagaaagaaaagaaagaaggaaagaaaagaaagaaagaaagaaagaaaaagaaagaaagaaaggaaagaaagaaaagaaagaaagaaaagaaaaagaaaaagaaaaaattggaagacaatctcacactgacatgaaagccccgactttcttggaaaataggaagatgtggtatcctcacatgtagcgatcagccgaggctgagcaagaaccaatcacctttactttgacgcactccccaccatgtgctatcatctccctctactaaagccaaagtccaggtgcgatttgtcggaatacttgcccagttgttttccttacacaaatccacttccctcatttgccgtaactgccttgaccatgcagaggtttgattcaggggcactggacctaccaaacaaaagatatcggatgtctctctttttggctcatcagcagaggtcaagctcccttgagaaagaaaaggaaaccaaagcccaagggctccccctgctggacccagtgagctcagcatttttggcacattacagacgttaaacttgaagagacacattcccaaagtattaatgcgcaaggccaagcctccaacggaaatgtacaacaaaaaaaaaaaaagaagaagaagaaggaaaataaaatagaataagacttcttgtctctgctcggacatgagaagaacttcgaagttgtcacttttgttcttacaacaagaaaaggctgaacaaactgagaatcaacagcttttcttagacacgtctaaagaactgcagtaacacagtgaattaccatccccaagtctggagacactggcaaatccagagagttactaatgagatccatttacacagggcagaagctgctggagtcactaactggtgaagacatttgcatggtaattctgacaagttgctgcaggctgggtaacaattagctcaagaatgataaatttctacaggtgtcagtcttaggagtccccacactttcgtggattttacctccagtaactctaccagtgaagagcccagaaaggccccctagcccatagccctggtagggagaaggaagagtaactgttgttaagtatacccagagcattctccccaacacaggcctattctccagggataaagaatttattggtaccttctcccacctggaagaagggatttctcctggccgggcatggtggctcgtgcctgtaatcctagcactttgggaggctgagttgagaggaacactggaggccaggagttcaagaccagcccggtcagcatggcaagaaaccccatctcaaaaaaaagaaggagaaggaggaacgaggaggaggagattttctcctgaatccagcacggcacattctagacttcctgtctcacctgaaatgaatggagagaagctgagaatcacttgtgaatgccataacccagaggcacaggtcccctaaaagacggatatttaatcgcagcgtgtttaataatgacttgcaaagctatacagaccctaattcctagaacctgtgaatgtgacctgtggcaagagagactttgatggtgtgattaagattctcaagatggggagatcattttgaattacctaagtggaccttcaatgtaattgcaagggtccttaaaagacaggcagcagggctgggcgcagtggctcatacctgtaatcccagcactttgagaggctgaggcgggaggatcacgaggtctagagatcgagaccatcctggccaacatggtgaaatcctgtctctactaaaaatacaaaaattagctgggcgtggtggcacgcacctgtagtcccagctactcaggaggctgaggctgaggaatcgtttgaacctgggaggcagaggttgcagtgagcctagactgtgccactgcactccagcctggcgacagagtgagactccgtctcaaaaaaaaaaaaaaaaagaaaaagaaaatcttcatcccttcccaagacaaagcacgaatattcctccccttgctcttaacgttcagccccttcaagaatgataccctatatctgtaacttcccagttctcaggagctgagaagttgatttgtaagcccagctcccacttccccaatcctgtagctgttgaatgaagcctgcactgctcaatactcactgttggtttcacatattagcttcatgacttggaacaggaaacagtcccctttctagggtgaccaggacccccagtaacaagatgggtctaggaaggaaaagcactgtgcactcccaggccccagcacctgggctcctgatttggggaagaattgacttctttaaattatcagatgttctgatcaggcacgggggctcacacctgtaatcccagcactttgggaggccaaggcgggtggatcacttgaggtcaagagttcgagaccagcctggccaacatggtgaaaccctgtttctactaaaaatacaaaaattagctaagcgtggtggcacatgcctgtagtcccagctactcgggaggctgaggcaggaggattgcttgaacctggaaggtggaggttgcagtcagccgagatcatgccactgcactccagcctggcgacggagcaaggctccgtctcaaaaaataaaaaattaaataaaaattaaaaaaaattatcaaatgttctaactcatcagcatggtgtagcttgccattattcaggatgttaattcctctcaacaatgtgctccagctttcagtgtagtggtcttggaaccattttgttagtttcacttttaagaatactgtgatttgaggtgctattttaaaagatactgtatcttaagtttaattttctgatagttgctaccagagatatagaagtgatttctgtatgttgactttggatgcagctgctccgctaaattctcatagttatatccaattagaggatattttggattttctatgtacgttatcttgtcattgaaaacaattatattttgcttcttccttcccaatcactgtgcctcttattcttcctgcttcattgaacccgctagtagttttattacaatgttgcataaagtggtaataacagatatccttgtttttcttgatcttagggaaaaagtgttcaattttcactattcagtataactggaagtccatgccacataaatacagtaacttcagtaccattcaccaataaaattctagttcatagttgtattcaatgtatacatagtgttttaatttttttattttaagaaacagtctcgctctgttgcccaggctgtagtgcagtggcacgagcacagctcattgcagctaactcctggactcaagcgatcttcctgccttagcctcccaaagagctggaattacaggtgtgagccaccacagcgcccagccatttaaaaaatatttttaattcatggatcacagtttaaaatttggagctctctcccagtaatctgaatgcctaacttctcttgaaataactgactatcttgcatgcccacgtaacagcaattagcccagggaagcaggagctgcccctctttactatgctgcattccccaccaagggctatggtctcccctgagctgaggccaaaacaagtagactgacaaagctttgtcaatatcttgccccattgtttatctttttgttgttgttgttgtcatttgagacaaggtcttgctcttgtctcccaggctggagtgtggtggcacgatcatagctcactatagtctccaactcctgggctcaagtgatccgtccgcctcagcctcttgagtagttgggaccactggtgtgtgccaccatgcctggctaatttttttattttttgtagaagtggggtctcactgtattgcccaggcaggtctcaaactcctgggctcaagtgatcctcccgcctcggtctcccaaagccctgggattacaggtagaagccaccatgtcccactcccattatttatcttaccccagtcctacttattttctatacctgcttttctcttgtagggactcgactgtgtaattcctgggaaaacagatgcactgagccattaaataaaaattcgtctagctgaaattgcttgaacctgggaggcagaggttgcagtgagccgagatcgcgccactgcactccagtctgggccacagagcgagaccctgtctcaatatatatatgtgtgtgtgtgtgtgtgtgtgtgtgtgtgtgtgtgtgtgtgtgtatatgtatatgtatatgtatatgtatatgtatatgtatatgtatatgtatatgtatatgtatatgtatatattcctctagccaggctgggtgcagtggctcaagcctgtaatcccagcgctttgggaggctgaggcagcaggatcgcttgagcctaggagttcgagaccagccttgacaatatagtgagaccccccccgcccccccacccctctcaagaaaaaaacaattcctctagccaagggtttactctctaacttcatttctcacggtggatccctctcaagcagagtccgggagccaatccacgtccaattgtgccccctgctggacaaggtccacttgttcagaggaaacttgcggagagatggagagctccagttgagatgctccagctccctctgccaacacagtttaataacaagtaataaagtagaaaaacaatatagcataaaaataattgaaaaattattttaattaatagtatgaaacaaaagagatggtagattagcagcttgctgctaataaggaaattaaattttctggtaaaattataataagcaatggtaagagaacagaataaaaataaaatgagaaaatctagcagaaataattaaggagatgatgacgatgaaaaaataaaattgaattagaggcgtgaaatataatacttggcacacagaaaacaaaagccagtggttcagagtccaagttcaggaaaatcgcacaggatgaaagggaaagaatcaaagaatgaagtaatgaaagggaaggttctccgaaggagtcagattatcaggagaattcttcatttaacttcttgctaataactagaaaactcgggataaattgatgatttttcaggaacatgtaaattacaaaaaaatattctcaaggagagacgtattaaatcaattgacaattttaatatacacagacaggatcatattaaattatttcaagctatcaacagacaattctgatataatgtaaacgaaagagaaaaataaagagcttcacaattgtttgtacagagcgagcatcacataacatgaaaacctaacaaggtaatacagaaaaggaaaagtatatagacaaatctccctatgaatattgacatggaaattccaaatatttggaatttagcgataaaaacctccagtaattttttttaaaataccagctgaatgtggaggcacagcctacagtcccagctactcggaaggctaaggtcagaggattgcttgagcccaggagttcaaggctgcagtgagctatgctggggccactgcactccagcctgggtgacacagcgagaccacatgtctttctgaggtcttggaggctaaaacgcacacacacacaaaaactcatatctctttaaaaataaataaacaaacaaataaataagccatgttaaaatggatattacctaagaataatgagatgattggatattagaaaatctattaaaataaattgtgtatagattaaaagagactatgatatcattttgttagatgtcgaaagggcatgtcataaaatatagtaacttttcccccaaaattcccttatataagattatttgcttaatctaaaattacatatttataatcttagatttacatatattatatttaatcttagatttatatatatattatatttacctacctgtctacctaatctacaaagccaaaagcagttaaatgcttctatgtaaaacattatgttgcccgccaccccaggacgtagtcctacgatcactactctttggcatcttcactcattcccaaagcaatctcatccagtccaaaggttttaaatactatcaaacattgataagtcccaaatatacatcttcattctagtcttcagtttgcagctttagatccatacatttaattgcctgtttggatatgtactctgcgtctcaaattcatcgtgtccaaaccttactctggacacccactccaagcctgctcctcctacattcttcctcatctcagtaaatgttaactccattttccagctgctcagaccaaggatcttggagtcttttttatcactcttccttctcttacaccctgcatccagtcagaaatcctctcagttctacattcaaaatatacccagaggctgggcatagtggctcacgcctgtaatcccagcattttggggagccaaagtgggcggatcacttgaggccagaagttcgagaccagcctagacaacatggtgagacatcatctcaaaaaaaattatatacatctatatctataatccaaatatatatatatatattcaaaactacttcttctcttcctcctcctgctcgttcttcttcttcctcttcttctcctcctcctcattcttcttcttttttttttgagatggagtctcactctgtcacccaagctggaatgcagtagcatgatcttggctcactgcaaactccgcctctcaggttcagcgattctcctgcttcagcctcccaagtagctgggattacaggcatgtgccaccacgcccagctaattttgtatttttagtagagacagggtttcaccatgttggccaagctagtcttgaactcctgaccttgtgatccgcctgccttgaactcccaaagtgctgggattgcaagcatgagccaccgcgcccggcctcattcttcttttctcctcctcctcctccttcttcttgtccttcttcttctcctctttcatcatttccatcctcctcttcttctttcctcacctcttcctttctttttcctcctcaccacttcttttccttttctgatcaatagaaccctgaagccaacaggtggggcagagcaagacagatagctgcgcagaggtcatctggaatggggagctccaagcagattgaggagggtatctacccagggatgtcagaggggagtgtcagaacctgcggagggagggcacttacatgtgtttgcacacagggatggccccttatgggtgtcagagcttgaacagggtgagtggagtcctttgccagagggcaccccagtagtgggaagtgggaccaagcaggatgaggagccagtcatgctggagaggagcagtggctgagatgagggactagttacactcaggagactgactgaacaaatgagtaaatatatcatgattaatgggaaacgagtttctcattctcagagaagggatttacacatatgggaaggcagaaaactacaaagacccatgtagtactggattgcaactagaggtaaaggagtgaattcatagatttcaatctgtttcatgaatgaaataacacgtgaatgcaaatgagagaccaattccaacaaagtcaggatcaagacaatggcacccaactatcacaatgattatttaacattctaacagtggggttcttggttgcaaaggaaaccaatttgggttaacttaagcaacaaaaaagaattcagtcataagaccttgggcagctgacagattcaatgaaaaggctaaagtaccaagtttagaaagtgggtcagaacccaaggaaacaatgaaagaagaactatctccaagtttccctagggacagcccagttcagtgccatcaaaatgagtactgagcccttctttatgtctttataaagtctcagtgtaagtttagtcagatacctgcatgctagccactaggtttccaggaaagtatgtatctagattttaggtccttagaggtgggaaggaggacttcctatcatgatggaaccccctaatagagaaatgtagttcagctgtgcactgcaaacaatgctccgagagtgctagcccaatgcaattacaaaacagaaccatataaatggtatcaaccctggaaaggatatatctttattatttgcaattagcatgattatatgtctgggaaattcaaaattaactgggaaaaggattacaggcaacacagtaactcattaaagtatcagttacaaaagggttttacaatttatcactattgacattctgaactggataagccttggttgtgggaggacagaagagatgttcagtgcattgtaggatgtttagcagcatccttggcctctattcactagataccagtagcactccctcccctaccaagttgtgacaaataaaaatgtcttcagaccttgccaaatgtcccctggggggaaggcaaaatcacccccatttaaattgggttgtgcaattaatttataagaatcaataactttcttacgttaaaaaactaaccaattaaaagttataatgaggccaggcaaggtgactcatgcatgtagtcccagcactttgggaggcaggaggagtgtttgagcctgggaggcagaggttgcagtaagccaagattatgccactgcactccagcaggggcgacagagcaagactctgcctcaaaaaaaaaattataatgaaaaaatcattctcgttcatatttaaagcacctcaaaatcagattaaatccatctgaaatggctttgtgtatggtatgaggtagggatctaactttacttgttgattctttacaagatcctgattagtgtatttatcttatatcttgccaaatcaaataacttgattatttttctaaatttaattttaagttccaggatacatgtgcaggacatgcaggtttgttacatagctaaacatgtgccagggtggtttgctgcacctatcaacccatcacctaggtattaagccctgcatacattagcgatttatcctgatgctctccctcgcctggcgcctccgacaggccccagtgtgtgttgttcctctgcctctgtccatatgttctcattgttcagtttccacttctaagtgagaacatgtggtgtttggttttctgttcctgtgttaatttgctgaggataatagcttccagcaccatccatgtgtctgcaaaggacacaatctcattcctttgtatggctgcatagtattccacggtgtatatttaccacattttctttatccagtctatcattgatgggaattttggttgactccatgtctttgctattgtgattagtgctgcaatgaacatacacatgcatgtatctttataatagaatgatttatattttttggtatatacccagtaatgggattgctgggtcaaatggtatttctgagaacttgattattagttctaaggtttttctgtaaattctcatgtgtttttttaggtagatgttcatgttgtctacaaaaatgacaatcttatcttttcatttctcacatttataccttatttcaactttctctctggctatctttcctaacaccacaaatgcaatgataattgtggtaatagtgggactctgcctcatttctagctttagagtttcatcattatgaccaatgagtgcctgagtatggctagtgtgaccaagtaacttaattttcagtgttgtttcactgtaattaatttaaacttaaatgggcttggcaaacctggcccatctaaaaataaataaaattgaacttctatctcatctcagactatatacaaaaatacatgccaggcttaaacatacaaaaagaaaagacatgaaagaatttgaagaaaatgtaggaaagaggccagatgtgggggcttatgtctgtaatcctagcaatttgggagcctaaggtgggaggactacctgatcccagaatttcaaaagcagcctgggcagatagggagaccctgtctctacacagaaaagaagagagagagagagaaagaaagaaagaaagagaaagagagagagggagggagggagaaagagaggaaggaaggaaggagggaaggtaggaagggagggaggaaggatggaaggaaggaaggggaagggaagggaaagaaaaagaaagagaaaggaaaggaaggaaggaagaaaaggaggaaaggagggagggaaggaaggaagggagggagggagggagacgatgtggctgtgatggtaactttcttagccaagagaagaaacccagaagctgtggagaaaaagagtggtcataaatgactatgtgaatataaaaaaattttgtatggtaaaatgtaccaaaaacaaaatcagtgcactaaggggtcagggatggtaaatttttcaatatatatggcagataaaagccaagatctatattccagcaagaactcttacaaattgaatttgttttaaaaaagacaaacattccaatagaaaacaagcaaagaatgtgattagagaattcacagaaaagcaaatccaaaaggctaaacatgaaacaactgctcaaattaaccagcggtttgaaaagtgcttatttgagtcaaaataaaatgtcatcttacacctatgaactggaaaaattataacacccttaagctggcatggatctgaggaaatgtgagcacctttaagttggcatgggggtgacgaaaagagtacccttacatgtagaagcaattttggatcatccattagcaatactcccacacattcactttatctcaaaatccacctcctaagaatctaccctattgaaacaaaagcagcactacagaaggtaaatatacaagtaggttaattgttgcattattcgtggcagcaaaactggaaataacgttaatgcccatcaatctgataatggctgagtaactttggtttgccaacaccactgagtacaggacaaatgtttaaaaatcacaacaaattgaacaaagaagcagctaggtaaaatcaatttcccttaagccagatatgaaagagatttgcaaaaaatgtaaagcaatgtcagtctttacattgattttcatttttgaaaatgtaggcatttttctttaaatatattaattgtgttaacaattaacatataacatgcattggggccggatgtggtggctcacgcctataatcccagcactttgggagactgagatgagcagatcgcttgagctcaggagttggagactggcctgggcacatggtgaaactccatctccacgaaaaatttaaaaactagccaggtgtggtggcacacacctgtagtcccagctactagggagtctgaggtaggagaatcgcttgagcccaggatgtggaggctgcaatgagccgagatctcgccactgtactccagcctaggcgacagggtgagactctgtctcaaaagaaaaggtcggggaggggtttatcattgttatttaaaataaatatataaatattttgaaaataattctcattgaatgaagattataagggaactataaatgtaactagaaaaatattagacaattcaatagaaaaattcactaatgatctgagtttataccttagtccattcaggctgctgttaagaaagtagcacaaataaacaaaataccacttcgaaacaagagaaatttatttctcactattctggaggctgggaagtccaagatcaagtcactggcagattaggtgtctggtaagggcccacttcctggtttgtagaaatgaggacttctggctgtgtcctcacatgttgaaggggaactctggggcctttttcttaaaggtcccagtcccattcatgagggctttactctcattgcttcatcacctctgaaatgcctcatctcctaatattatcacattgtgattcaatttcaacatatgagtagagagggacacacacattaatagcagcaaacttcacaaaaagaaaatccgaatgaccacgaattatataaaaggattctgaataatttattatttttaaaacatatggtgaaattagcagtattgcaccaatattcatctcccggttttgaacattatgctgtggttatataagagagtaactttagggaagttcagtgaagggtttgcaggaatttgctgtaccatttttacaacttttcaaaacactaaaattagctcggcataaacagttaaaaatgtggaggagtcaaattttaacattttacattagagtatgggaacaatgatttctcagtacttttagctgttacctttttctctgttcaccttactgcgcagttctggtactaaatagatgctcactttgccagcaaaaggtcctagtgttggctgggtgcggtggctcacacctgtgatcccagcactttgggaggctgaggcaggcagatcacgaggtcaggagtttgagaccagcctggccaatatggtgaaaccctgtctctactaaaaatacaaaaattagccaggcgtggtggcgtgtgcctgtagtcccagctacacaggaggctgaggcagaagaatcgcttgaacccaggaggcggaggttgcagtgagctgagatcatgccacactatactccagcctgggcgacagagcaagactctgactcaaaaaaaaaaaaaaggtcctagttttagtgatgttgccaagttattaaggttccttcctcactaatcgaaactaatacaaggaaaggattacttcctctttgggaaatctggtcaagctgatgatccaatttaattaaaacaataccacaaattgaatctttgtttactgcttgaaaagctactttctagatccttttgtagttcataagtgtgaggactgggttttcaggctcgtgtataagatgtgcctccctcactccttgttacaacatcggcatattactcatctgaatggaaaaaaaaaagcttctgaatagtttcagaagtagatgttaagattcatcttaaagtagtcatataggtcaagaaatgaaacatacacaatatttcagaatcccctgcatgtggcttccccagtaataatccatgcctccctccagaagtcagtaacattctaactttttgataattttgcgctcacttttctttttattgctattagttatgtagttttctttttcttttctttttttttttttgagatggagtttcacttttgttgcccaggctggagtgcaatagtgcgatcttggctcaccgcaatctccgcctcttgggttcaaatgattctcctgcctcagcctcctgagtagctgggattacaggcatgcaccaccatgaccagctaattttgtatttttagtagagaaggggtttctccatgttggtcaggctggtctccaactcctgacctcaggtgatctgcctgccttgtgcctcccaaagttctgggattacaggcatgagccactgtgcccagcataatagttttcttttagctatttttaagattacatatttacatgtatggaacaagattccatgtgttcatttgattttgcaaatttttataatatcacattgatgacaatattctatgtattcatatagctgtatttcattttttcattgctgaatagtattccattatgtggatataccacacttcatcgatccacttgccttgtaagtgggagctaaatgatgagaacacatagaggggaacaacacacactggggcctactggagggtggagggtgggaggagggagaggatcaggaaacataactaacgaatactaggtttaatacttgggtgatgaagtaatctgtataacaaaccaccaggacacaagtttgcctatgcaacaaacctgcacatataccccaaacttaaaataaaagttttaaaaaagtgtattcaagagttgagatttagcacaattaatagcttttactgtttcatcaagtgcaatcttaaatgaagctggaattttccttaacagtgagtgtgaagtgataaagaatacaactttctagcacaatttagtgctattaccttgcttccggctaaggttacagcccttttatgtaccattgcttttgcaccagcaatgtaatgtcaacacagagaaaaacgcaaataacatctgtgtattattactaaaatagttttgaccttgaagatgccccctgaaagaatcttggtatctcctagtagaaccctgtctctagaggatgcatcttagaggaacttctgtatatatgtcagtatgcctgtgtacagatgctccttaacttatggtggagtttcatcctgataaatctgtcataaattgaaaatatagtaagtcagaagtaattttctacttaatattttccatgtatgatgggattatactgaatgtgtactcagtatactgagtactgaatgtgtatggcttttgcactatcgtaaagatgaaaaattataacttgaatcatcataagtcagggatggtctgtatgtaagtgtgtgtatatatctcctacttcagtagataatgctaaaaaattttcccaaacaattgcatgaatttacactcccaaaagtgtacaatatgagagttaccattgccccacatccttgccaacccttggtactttccatttttagcaatctgatgagtatgtaatggtatccactatgacactgattggtttctacctctaaagaggtcgaggaccttttcttatacaattggagttcattggattttcttcttgtaaagtcacttttgaagtgattggccaattttgctattggattgcctgatttttttttctaattggatttgtatattcctcagttgatgagaattgttatggataaaggtagaatttcatcagactcatttccaccttccatgggatggtcatattatgtttttttcttgtatttgagcttgtgataaatacactaaatgagtttctaatgttaaaccacccttgcattcctgacataaacacatcttggctatgatgcattatcatatttatatctagctctatttaatttgcaaactctggcttaatatttgtgccactatatgcctaattaagatttgcctatacttttatttttttatattgttgagtttgggtattaattttataattagccacagaaaatgagcaagagtttgaataggaatagagtaatttcttccttaagttttggtacaatttgctggtatacttaaagtttagccatcttgacctaaagtttgcttggtgagatgatttttactactgattcttccgaatagttttagaactattcaggttttctacttgttttctgaggctattatactaaattacatatttttattaatttatccattaatctaaatgtcaaagtatgtgaaattgttcaaaatattatcgtatattctcaatgtctgcaacatcagtggttatgtcctttatttctgacattagttacatgtgccttctctcttttcattgtatttagactccccagaggtttatcaattttattactttttcaccaaacaagttagggctttgttgattctgttgtatgcattttaaaacatgtattatttagtacttattttattattttcttatgtctactttcttgagtttttttatctcttgagaagaaagatcgaattcagtttatcttatttcaattccagtaatatgattttaagctattcatatctgtcttagtccatttagtcttgctaaaaaagcaatacctgatgctgggtaatttatacagaaaagaggtgtatttggctcacagttctgcaggctgtatagaaagcatggaaccagcatctgcttctggtgaggcctcaggccgcttctactcatggcagaaggtaaaggggagccaccacgtgcaaagatcacatgaggagagagaaagcaagagatagggacagtgcaggtggcaggttctttttaacaaccgctcttgtaagaattaatagagcaagaactcacccattaccaagaggacagtaccaagccattcatgaggcacccactcccataacccaaacatctcccattaggttccatctctaatactggataaaatttcttaattttcttttttttttttttttttttattatactctaagttttagggaacatgtgcacattgtgcaggttagttacatatgtatacatgtgccatgctggtgcgctgcacccactaatgtgtcatctagcattaggtatatctcccaatgctatccctcccccctcccccgaccccaccacagtccccagagtgtgatattccccttcctgtgtccatgtgatctcattgttcaattcccacctatgagtgagaatatgcggtgtttggttttttgttcttgcgatagtttactgagaatgatggtttccaatttcatccatgtccctacaaaggatatgaactcatcattttttatggctgcacagtattccatggtgtatatgtgccacattttcttaatccagtctatcattgttggacatttgggttggttccaagtctttgctattgtgaatagtgccgcaataaacatacgtgtgcatgtgtctttatagcagcatgatttatactcatttgggtatatacccagtaatgggatggctgggtcaaatggtatttctagttctagatccctgaggaatcaccacactgacttccacaatggttgaactagtttacagtcccaccaacagtgtaaaagtgttcctatttctccgcatcctctccagcacctgttgtttcctgactttttaatgattgccattctaactggtgtgagatgatatctcatagtggttttgatttgcatttctctgatggccagtgatgatgagcatttcttcatgtgttttttggctgcataaatgtcttcttttgagaagtgtctgttcatgtccttcgcccactttttgatggggttgtttgtttttttcttgtaaatttgtttgagttcattgtagattctggatattagccctttgtcagatgagtaggttgcgaaaattttctcccatgttgtaggttgcctgttcactctgatggtagtttcttttgctgtgcagaagctctttagtttaattagatcccatttgtcaattttgtcttttgttgccattgcttttggtgttttggacatgaagtccttgcccacgcctatgtcctgagattcaatgccatccccatcaagctaccaatgactttcttcacagaattggaaaaaactactttaaagttcatatggaaccaaaaaagagcccgcattgccaagtcaatcctaagccaaaagaacaaagctggaggcatcacactacctgacttcaaactatactacaaggctacagtaaccaaaacagcatggtactggtaccaaaacagagatatagatcaatggaacagaacagagccctcagaaataatgccgcatatctacaactatctgatctttgacaaacctgagaaaaacaagcaatggggaaaggattccctatttaataaatggtgctgggaaaactggctagccatatgtagaaagctgaaactggatcccttccttacaccttatacaaaaatcaattcaagatggattaaagatttaaacgttaaacctaaaaccataaaaaccctagaagaaaacctaggcataattttcaacctttcaagagttcaataatatttttgtttcagatctccatcttaacaacaaagtgatcagaaaatatactttttgtgatataaatcccttaaactgtgttgagattttctcaatggctcagtctctgatcaagttgtacaaatattctgtgtgtgctttaataatgcatgtattgttgctgttgtgagtgtactgttttgtcttttgtttaagtcaatttgttgatgatgttgtgtagattttcttcatcttcactgacttttttcatgtttaatttactcattaatgaaagagatatgttaaaaaatttcccactatgattatgaatttggacattttctgtagttctgacaactttggatttatatattttgaggctgcattatttagtgcatactaattaggtttttaaatgttctgatgaaattattatcattgtgatatgatcatcattactggtaagtattttgcctaaacactttgcctaaataaattttactttagctgatgtcaatatatctacccaggtttattttggttagtatttgctgcattatatataaattttcatcttttttctttgacattcctgtatcactatgttttagatgtgtctcttgtaaatggcatacagttggatttcttttggcgcagtctagcaaactgattttaactgaagccttacattacacttaatgcaattactaatatatttgaatttaaatctattatttttgtacctgctttgtgttctgcgtttttttttttttgtttttttggttttttttttttttgccttttcaatgattccttttttcctctttctggcctacatttggactgctggagtaatttctattcttcttagttcatttctttcccacaagtttaaaagttttgcactctattgctaagtttattagttattctttaaaaaacatataatacacagttaataaagtctaaagttagtgaccttttaaagcttctccaatataagataggacattagaaccctttactcagtttgcacattccaatatattactattttcttattttacatgtgtcttatacttaagcctcttactcatttttattgttatgattactcaaattattactaatggtgaaataacagagagtgaaggtggagggcaaagcattgggaaattaagtggcactcagtcaccttggtgataaaggttattatgaagactgtgtggcagacaggctgcctctgaccaacttgaagaccaaacaaaaaggaaaagatagctgggcacggtggctcacgcctgcaatcacagcactttgggaggccgaggcgggtggatcacgaggtcaggagttcaagaccagcctgacctacatggtgaaaccccgtctctactaaaaatacaaaatttagccaggtgtggtggcacacacctgtaatcccagctactcaggaggctgaggcaggagaattgcttgtgaaccaggaggcggaggttgcagtgagccaagatcgcaccactgcactccagcctgggcaacagagtgagactccttctcaaaaaaaaaaaaaaaaaaaaaaaaacagataaatgagtccttgcatgcccaacttaagagatatgttagaaacatcagaaagcatctatggctaccttaaaagaatcccttatcttttttaccatgccagctaaatgcacaacccctccagttcccacacactaaacaagaaaataattttaaggccaataaaatacaactgtgggcctcattacccagaagcaggtgacttgatgtattgatgaaatgacctactgaaggcaagttatagtgccatctggcggtgaatatttggtgaggttgggtgaggtgctatcgaacagtatttgccttaaaccagcaccaatatacagtgccatttctcccagagccagaatacacaatgtgaaaaccaagcagtggaggtagtgagaggtgaagccagctgggcttctgggtcgggtgcggacttggagaacttttctgtctagctagaggattgtaaacacaccaatcaccactctgtaaaaacgcactaatcagcattctgtgtctagctaaaggtttgtaaatgcaccaatcagcactctctaaaaacgcaccaatcagcattctgtgtctagctaaaggtttgtaaatgcaccagtcagcactctgtaaaaaacacaccaatcagcgctctgtgtctagctaaaggtttgtaaatgtgccaatcagcactctgtaaaaatgcaccaatcagcactctgtaaaatggaccaatcagtgctctgtaaaatggaccaatcagcaggatgagggtggagccaaagaagggaataaaagctggccacccgtggcaacccggcaaccagctcaggtaccattccaggctgtggtgggtttgttcttttgcctttcacagtaaatcttgctgctgctttctctttggtctgtactacctttatgagctgtaacactctgtgaaggtctgtggcttcattccttaagtcggtgagaccacgaacccaccgggaggaacaaaacaactccagacttgccacttttaagagttgtaacactcactgcgaaggtctgtggcttcactcctgaagtcaagtgagaccacaaacccaccggaagcgagaaactctggacacatctgaacatctgaaggaagaaactctagacacgccatttttaagaactgtaacactcactgcaagagtttgcggcttcattcttgaagtcagcaagcccaagaacccaccggaaggaaccaattctggacacagtagaactggttcctcttccttattccacctaatcacacacctatgcaattttttgcttcctaaatttgcaactttggagtgggtggctttgcgagtcctagtgtttcaaggagaaacacttccactaaaggacccagttatggtttcaagtggaaggagaggctgcctcttggccattttgggcaagtcatgatgctaaaccatcaggcagagaaggaggtacctttactaagctagtaaaggtaccaattgatccaattattaggagaaaaatatgttgttgctatacagtgcaatcaaggagaattaggagtggaaccgagactattccgtcgggaggctttttatactctgtccagaataatggtcaatggataactgcagcagtgcaataaagacgaagcattaatgacttggatcctttgggtcactctaccagataaaaaattccaaggaaacgaagtgctagaggaaggtaagagagacacaaaatggttatcaatttaggctttatgaccagctatagaagcaggaactgcagctattatgttttatggtaactaattgtttctttcccacttcaatttcactctgatatcttacatgaagagcacttttcatggctgttgttacaatttcagtttcagaagtatagcaggaatgacttccctctgcagtaatagtagaactaatactgggcatctctgtgttaaggatgtgagcttgttcatccaaacaaaagaacgtaatgggtgctcagtgacaacagggatgacctgtgcctcttcagatccatcattcacttgtctctgctcatttctgtgcactgacaggctgacctctcaggaccgcatcatcagcttccccttgccagtgggaggcactgtccggagattgaagggtgggaggaaagaagtcagggtttttattcctcctgttctctccctacagttctggccgtggctgcattcctctgtgctacaagtcctataaggcagcccatcctccaaggctactgcccttgccccatcaggtctaggctggtacccgtttcccactgctgcttgtccttggatgctgcaccatctctttttggacctcttaatcctgcctacatctctatttagtcccttcattggcctatgtttattatttatttattcatttatttatttattttgagacggagtcttgctctgtcacccaggctggagtgcagtgacgcgatctcgactcactgcaacctccatctcccgggttcaagcaattctcctgcctcagcctcctgagtagctgggactacaggcgtaagccaccgctcctggccactttttgtatttttagtagagacagagtttcaccatgttggccaggctggtctggaactcctgatctcaagtgatccgcctgccttggcctcccaaagtgctaggattacagacgtgagccaccgtgtccggccaagtctatgtttaattaagctcttgaatgagccatcagcttcctattcgaatcctgatggatacatccatatatttaccacctgtttcctcctcgtacctcagaccttctacctgggatcattttcattctatgatcaaagtacatccatgaaggagggtttcagtttgcttttaccatatgccatagtaccagtttggtgccacttttacttttgttcctttcctctcaggagactgttgaaaactacagctcatttttataatcagaataagcctatgctcatcagtcaaaagcaggtttgaatgctctgcttagttcttggagttctcactttctaaattttagctaggaaattcctcactagattgtctttccattattttataaagattgttttgagtattttatccgccacttttaatgactttcagcagaggagttgatccatatagcctggactgccattctcaaaaatgagaaagttctcccctctcttaggtttttttgttttcccataagatttttgcatttgcttgctatttcacgtaggctgttgggaagaatgtctcctgaaatcttggatgagaaatatgacaatagagaaagacaattcactttcaagatatcaaaatactattcatataacagaaaaacaaaaaagtattaatattagccatctattgttacctagggaattattccaaaactgagcatcttgatacacacttatcttacagtttctgtggtcaggaatctgagcacagcttagcttggtccttggcttacggtttctcactaggttgaaatcaagatgttgactcagggtcttcatcctcatctgaaggctctactggggaatgacccacttccaagtttattcattggcttttggcaacatgcagttcctcacagggtattggaatgagagcctcagttcctttctagctgttggcaggggcttccctcagttccttacctcatgagtctttcaaaaatggcagctcagaatatagccacttacttgattaatacatgaaaatcagaaaggcagtagagtttgctagcaagacagaagtcacacagttttttgtaatctaatattggaaatgacattccatcacttttgccatataccattagttataagtaagtcactaagttcatcctttggggaggaggttacacaaacacatgaatatcaggaagtggagatcattgggagatattttagaaggctgacaaccccgcaaaaataatttctgaatttccatctgtatctcagcattcaatagctatgcacctgtttcagcacattggcaggagcaaaacaatagcaaagtgtttacagcatgtatcgtgtgaaatacatccactctcaaagcaccttcgtttggctatttcttcagtaggttcatcaaataaaccactttttttcaagcaactctcagttatcagtacgtcctgctgggtgggtattgtcatctgcagagtacagtatcggctttttgtttaagtattgctttgaacatggaagagctgctttgtcatcctgtttaaaaacctcataggcatgcaattccaaggtctcttgtatgtcatgagtttgattttgactgaagaatgatgaaagtgtggcccaaccatctttctgcttatggacattaattctattacctgatactgagctctgattattcctggacacacaattaaaggtgtgaagaaataataatatacttctaatttctaattcactcatagcctttgccatttttgttccattatcaacaattgacttttttcatatgacatacattccataaagtatatgcactatgttgttaactacgtgtaagaccaagaaatatctccaccaccaagtagaaatatagtgaaattcatcataaatcaggaagaaaacacctgattgtttctctatgtccaaatgttcaatctataagatacagaattagtacataaaataattttgtgcacagcttaatgtaatttggaataacttttcaaaacatgttttctagaaagaacttttaagaatcataattttagcaaattttgaaaatcctttgtcttctacttcaaaaaatggttgacagtgttgtgcaatcaattttacagctttaagattttagcttcactaactcaaaactataaagaatttttttaaagtgtgcttataaaatctgttgttttgaagtttgattagtgagaacaaaatgtatttggggaatctgatttccaacacttttctgttttttttttttcatgctctttgcacccattatgatgtctggatcaaagacgatttagcacagaagttgttacacatgattttagagagtttcatttctacttcaagaaatttaagtaagcaaaattgccaatctttttgaaattcatcctcacaaatgtgaacaattttcagataacactttttctaaaaagatacacagcctaaatgtaaataactaaaaaacatcaaatacggtcatcaaagattattttcgttaataatatgaatgatagaataccaaaaaattctacaagggaggctgcctatcacaaaaatgatctctggatttccatggaatctaatctttgctgttctgactcatgttattattgatatttttacaatcactttccagttccaagaggagacaatattctttctaatggcatttaactaaagcactcttaatcttcataccaacactcagtctatttcctgagttgtataattatgcggaagttctcagtaattgtttttggacctgaaaggcatggtgtaatgatagagtgcccccaggactgaagcactggttcatcccagctgctgtgagtgttgattgctgacagctggcagcactcccttgtaaggattgccttcagagcaaggagctgcctcacccaaagtcacaaccccttcctgggtcagctcacatccaatgactgctctattaaatcagcattgtttatgctggaggccatgagcctgtttatgctggaggccatgagcctgaggttttctccatactttgagttcctacctaataaatagcaacctaagtcagtaggtaaacaaaccgaaatgtaacttagtagtatactttttgtaacaaatagcaaggttccagccaatcacaaacagccaagcttcaaccaatcacaggcagctaactgatcatatccgtgcccaaataaggcaaatgtcttgctgtagccaaccagatgatttctctactttgcttctgtgttcagcttatacaagctcactgctcttctgattctgagtgttgccctactcatgaattgttctctactcaaataaactgtgttcaatttaatttgtctgaagttcttcttttaataggtcagtgaatggtataaaggcccagtcccctttccccgattcaggacatctctgtggagccatctagctgtagagtttcctgtaggattggctggggcttctgttatgactgcatagtagttcaccttctcccactgcctaatcctacttccttcgctcccctacgagtgtgaatcctgagagcaggaaattaataggggtgttctcaggattcacacttgtaggggagttctaacctctgcttcagagtcagtttcctgaagaatcatctgtaacttataggttttcacaatcaccattatttatttcagcctcttactcctgtaattgtataattacacacacatttatactttgataaaaatttaactttgaacacacacacgatgttcactccaagctacattagaatgcttaaatttgaaggtgactattaagattttaaagttaggaacatgatttgttcatatttctaatgttattgtgctagttagataggctggtaacccaatctgtcatgtattcatcgtgaccacacaagttcagggatgccagaaatgaacttcaaattggcactcagtggttccacctccaaaagactgaggtgagatcaaagtcaaatagaaaaaaatgaacaaatattgaggctgaagctgaattttaatgcaacccaactatgtgcatgtttgtgtgtgtatgtatgtttacttaaacatgaagtaaagaatgacaagacacacagataaacatggatactatattggttttctagggctgttgtaataaagtattataaactgagcagcttaaaacaacagaaattatccgggcacagtgtatcatgcctgtaatcccagtactttgggagactgagggcgggcagatcacttgaggtcaggcgtttgagaccagcctagccaacatggtaagatcctgtctctactaaaaatacgaaaattagccaggcatggtggcaggtgactgtagtcccagctacttgggaggctgaggcaggagactcacttgagcccaggaggtggagactgcagtgagccaagatcatgccactgcactccagcctgggtggcagagggagactccacctcaaaacaaacaagcaaaaacagaaatgtattctctcgcagatgtggaggctagaagttagaaatgaaggtatcagcaggaccagcttcctctgtaggccccttggtttcttgttctagcttctggtggttgccagtcatccttggtgtttcttggcttgtagatgcatcacttgaatctctctgcctccatcatcacatggccttcttcccaagtattttatctgcatcttcaaatatctctctccttatcagattaccagtcattggatttagggcccactctaatccagtatgccttcattttaacttgattacatctgtaaaggctctcaaagaaggtcacattcacaggtacaggggattcaaactttaacatatatatttggtggggtggggacacaatttaactcacaacaggtatgacagataactttgggaggagaagcacctggtgaatgggtaggaagggaggggtcaatcaaggtaaccaaagaaaaaaataaatgaggatgggaaagaatacagtaaaaataccttcataagaataaattgccctgttaatataaaattctgtgcatgtgtatgaataaattagaataaagagctagctctgtattaatttgtaggcataacattcgataattcttttatatggtttattgtgtgccaggcactgttttaagcactttccatacattaactcctttaatccttatgtctcaacccatgatataggtactattattattacacccattttactgatgatgaaactgagacatagagagacatagctagtaaaatggctgagccaggattcaaacctgagccatcgggcttcagaatctgtgctcttaatcaccttggcatatgtagtatgactctgttcttcagaaactaaaacaatatatatgtgtacaaatgcatatgtatacatttatattttagaagacataaaattaaagtatcaagatcaaaaataaaatcttggattctaaccagctctgtcagggctcacagacaatgaatgataaatattctggttggcctattttgtgtcatatacccagatgcccagactaggtttttttggggggagaaggaggggcatcagtgcttggacattcttgtcagagtcatgtggagtgggttacttaaaggaaagagatgatctattatcagaggtaggaggagatggcagctgacggacttgcaaaaactataactagtctgtctccttgaacctcagtgtaaccttccctacctttttcttagatgtaaacagcagagcagctgaaggtccttcactcatcaaacaaaaagaaggtatggcccaaggtgaagagaaaggctatagggaaaccctccccaaaacatcacacccattttcccatgccctttgttcagaaaataattaattgtggaaatgagatctgttgcctccccacttcccccagcccagacccgacaacaatggggaccctgtctctacttcctacaagtccaccaggggcaaattaccatttggggttatttaatggtgtaataggagaatctgctgcttttagttcaggggtgtccaatctttcagcttccctgggccaaactggaagaattgtcttgggctgcacataaaatacattaacactaatgatagctgatgagcttaaaaaaatttgcaaaaaaaacccaaaacctcaatgttttaagaaagtttatgaatgtgtgttgggccacattcaaagccatcctgggccacatgaggcccatgggctgtgggttggacaagcttgatttagatcatctcgtgattttaggctctgccagtgtggggattatcccacctgcagggattatgtggtgctctaggattatcttgggtttggggttgatccccccacatggaaggattgtctggtggtgctatcggattatcttggttttagggttgatccctcacatggaaggattctctgctactttgatgttcctcatgacccggtgccgcctgttctatagtatcaacgtgtaagtccttgactcagacctaattcaaggtaggttaaggtgtcctcctgtctaccagttcctgtttcaggaacttgggatgaccttgtgaagggtaggaagtttctattttcctttgaagtgctgttccaagaggtaataatagtggaacttgagtttcagcagttgatgagaatggtggcccctgtgtctaagaagtatgagaattacaatattgggtagcagagactgataaagatggtgatataggttgagcatcccttatccaaaatacttgagacagaaagtgtttcaggtttgatttttttattttgtattttggactattttcatatatataaaatcagatatttggggatgagacccaagtccaaacacaaaattcatttgttttcatttcatttatatatgccttctacacatagcctgaagataattttatacaatatttttgtgcatgaaacaaggttttttgtttgttttaagacagggtctcactctatcaaccaggctggagtgcagcctcaacttcctgggcttaagcaatcctcccacctcagcctccctagtagctgggagaagaagcatgcatcaccatgccctgctaagttttaaatttttttattgtagagatgggaatcccactatgttgcccaggctggtctcaaattcctgggctcaagtgatcctcctgccttagcctcccaaacagctggattacaggcataagccactgtgcccagccccatgaaacaaagttttgactgcaatctatcacatgagatcaagtgatggaatgaaatttttcacttctgacgttacgtcggtgctcaaaaagtttttgattttggagcatttcagattcgagatttttgcattaaggatgctcaacctgtacttgtgtgccaatgtctgatgggaatggtggccccctgtttcagggagtgaaggcaatgatggatcctgagttctggatatttgtaggaattgcagtagatgagtcttatgtgctgagagatttggagccctgtatttcagagaatgaaggaaccagtggtccctgtgacttgctaactgatgagaacagaacagaggccttatgtttcagaaactaatgggaattatggtcactgttcctggggggcttaagcaagtcccagcctaatccacaagtcatttattattcactcatctcctcattcattcacttagcaaacattttcctgagcccctgctctgagccatgcctgggtggagtgatattgaggacacagaaatgactcagacccagactgtgccctcagtaaattcccaaagacagacccagacgtagaaaatcacaacacaacaggatcagggccaggacaaggactgtgatgtggtgcctgtcctgatctgtctacagggcatccagggtgaatgtagaatgacagtaactctagatcgtaagtgaaagtgaggggtctgacaaagggtccttcttaatcatacatgaatttgtgtgcatgacaagtttaaatgtacccagtgtcaatccttagaaatagcatattttcccagagcaagcccaccccaaagaaggagccagagaggcctgggtttgaatctctagctccatcacatactttgtgagcttgggcaactcgctattcagaactgcatcctattcagtattccatccttacaattgggataataatagtttctaataataaggtttctgtgtaatcaatgatataatgtataacaaatactcatcccaggaactggctccaagtagtcattcaataaagggtatctgttgtcattattattatcccattgttagtaattatcaacaaattttaaaggatctagaagtaagcatttatcgaatatctgggtttagaggcttaaaagcattggacaaaatcactttaaaaatcagcaaatttgggccaggtgtggtggctcagccaaggtgggaggatcacttgaggtcagaagttcaagaccagtccagcaaacgtggcaaaaccccatctctacagaatacacaaaaattagccgggcctggtggcgcaggcctgtagttccaaccacgtgggaggctgaggtgggagaatggcttgaacctggaaggcagaggttgcagtgatctgagataatgccactgcactccagcctgggcaatccgtctcaaaaataaatacatacatacatacatacatacatacatacatacatacatacataagcaaatctgtaaatatcaatatgcataaccattagtttcttgacataaaaaacctcccaatctcccaattaactgaatacactaggaataaatagatgaatacaatggaatattatatcactattaaaatgaatgaggaggttctataagcctagatatgggaggatctttggatatcatgtaaaaaaaaaaaaaaaaaccaaggtgcagaataatgtgatcctatcaggggacagaaaagaggagggtggtatatatgtgcatagatgtataaaattcctctggaaagatacataagaaattagtgaatatatgctgtccccagagaggagaactgggtggctggaggatagggagggagggagatgcactgttgaaagcccagcaccatgcatcctgaacgttttccctggctcttaatgtccactaagttctcagatgcccacagcatctctctcctctaccctcttcttcctcctagttccccattgaaagcaactcctgccccatccgttcctgggccagactcagggagttgtagttttcctacctgtttcccgcccacaggttcctgttctctgcccccagtgcccagcagtctccagccatctccagctcctcacattcctgccccaccccttcctctctccccaggtcctagcccgcaaactgcagggagggggcctcctccccagcctccacccgtctctccccctccactccacacagcctcagcggggtctgacattcagctataaccgtgtccccgccccttgctcacaaccttccagggctccctgtcaccctcagaaggctaagttcccagcctggcctgaaactccctaagaatctgaccccgcccgctcgccccaccagcctcatctcctgtgctccttggctcctggcttcggaggctctagtcagacttaagggctttgttgtcctcccagcacctccttggtttcctgccttgggccttcgcttcagctgtgccctctgcctggaagggccttagtggaggtcatgccacaaccacgccttctctggaggtcctctctgccgtctccagctgccaggattcctcccgccctgggctctcacagcctctggcctctccctgtgtcatacccagatcacccgggattgggactgtctgcggctggctctgtctcttccatcagactgtgagctccatctgcaagggcagattcgggtctgattcacctttgagcccccagtgggtgggggtggggggtggagatactaaagctggtgggggcgaagctgggagagcaggaagggggagagagagacgggcagaccctgactggttcggggagagaggggaggagaaagcgagagagaggaagaacagagacacagagacaggaagggagggagagaaacagagaaaagggaagaataaatgggagacacagataatgccccacaggcagagaaagaggatggagatagggagagggcgaaaggaaggacagatgtgcagagacagaagggaggacagacggaaagagacacagagaggcagcaaaagcaaccaagaatgacaggagcagagaggaggagggaaagagggagagagagagagagagaacgagagagaagggagggagggagagagggagagagagagcgagagagcacgcacagagcgaggaggaggcgcaggagagaagagggagggaggccagcgagggacaggacggggcggagaggcggaggggagctagggaaagccggggaggagcgagactggccgaggaggagggcgggcgagcgggagcgccggccccgccgcctcccggcctcttttgtcccttccctcctctgcgtcaggcttctctggcccggcctccccctcccgctccctcctcctccccggggctggatggaattttttcccctggacctgggccagctccggggcaggggggaagccaggccggactgggctgggcggtggggaggggccggggcggggggccccctggggagggggctggtccgacggccgcgcagccggcggggtccagggagggggagccccggaccgcagagccggggaggaggtgacggccggagggagtcggggagaagggaaggaggatggcggggacggcgggaggaaggggagaggccgccgtgcggcgaaggcggggagaggatggagagcgctcggcggcggtggggcccggcctgcgggcccggggcggcggagaagaccccttccctgcgacgcgggagccgcgggagccgtgagtctgcggaaagggagggtggggggctggggcccgcactcctgggtccctgagggaggagcacccgggggcctggatttcagggttcttggaggaggagttgggggtggggagggtggggtggctgggagcccagactcctgaatccttgaaggagggggctgggacctggatcccggggtccagaatctggagaaggctggggacacttcctggattcaagagggaggacagagatgggggctggggctggtaggatcgtggctggaagagactaggggcgagctgcccgagccctcgggggaggtggaggaagactggctttggagtgcctgcggcagcggaagggttaacgtctggctggaggggagggggaggcgcagggatggggctgcggggctttgaggggtcaagggtgagccgtgccagtgggagggggccgaggaggagggggaggttgtctgggctgccagacaggccagggtcagcggcgggggcaggagatgtctggaggaggagaggcccagcatccatgctccctcggggacccgggattccaggtcccagacccctcctccctcagatctgggagtacaccacccagtcccccacccattccagaatccgagcccccagcccccttttttccaggatccaggagtctgagcccccagtctgttctctcagaccagggaatccacactccagcccctaactccttcaaaaccccagagttcagaacctcagcccctcttcccaaggagcgcggcccccaaccctctgttcctctagaacccaagcgttcaggctccggcatctttctccctttgaagcctgcagttctggggatccccaggcccctcctcctccggaacccaggagtccccacctcctctttagccccagctggagtccagccctccaggggttaagggggcgggaccagctagttgccatggtgccagactgtttgggtctgctctctgacccttgggggctccccagggtccgcagagagggggagggggacctaggcctgggggaagtccagagcctaccccttccccaaagcggggctatgggcccagggagttcgcgtttccaccaacgccttgtccagtgaccttgaacaagtcctgacccttctctctccgcctcagtttccccaaggagacactggttggcgggtgggggagatgcttaggtccggggaatctctgagattctcggcttcccctctcccctcaccctcctcctcaggccccaggcagccccggggcatgctgggaacccaggcctgggctccgggccaggttggtgtgggggggtgggggcgggggcagcctcctcccttccccttcctccccaccttggcctgactctcgcccccgcctgagggtctgggaggttgggaaggagggaagggggaagagagctggccgtagacccgtctccggcccccgcctccccctttcctcctccgcccctttcccgcctctcctccccctcctcaggtcgctaccccagccctgggccccttctcaaaccacccccaccccacccccagctccagacctggctcgagctgcgagggggagggagagagggaaggagaaaagagagagagagaagggagggagacccaaagagagaagggggaggggaggaaagagagagacctaagagggagggaaggagagagagagggagagagacagagactgagagagagcaggagacggaggtgagggatggagagagggaaggggcggagggagaggaagtgaggaaagacatccgaaaaaagggggtggagaagggtgagaaagaggagagagactgagagagggccagagagagaatgagagagacaaagagggggaagggggagaaggggaggatgaaagacagaaggtagaggaaaagcaggagaaagagggggagagaaggaagaaaacagaagcggggagaggagagaggcgatgggcagagagagaagccagcgcagagccagggagggatgtcctgatgcaggaggaggctgggaaccagggaaggtggaaagaaagagggagagagaaaaaggcagggccagagagacctggactgcgagaaaggaaccggaaggtgcgcctggagcaggggcagcgagaaccagacagtccaggaggaggggctgggcacgggagagaccccagctggaggggctcagagcccaggggtggggagggtgggtgctgggtcccggggtccagaagctggagaaggctggggacacctcctggattcaagagggaggacagagatggggctgggcagactttgggagcctcttcccctctctgaggctcagccccctcacctgccaaatggggatgctgagggcacctcgctctctggagtgggaggtgtcagggagaggactggtgctcagggcctggtatggggtcagcgctgggagattgtggctgtcatagttgtaaatgacccaaagaagggaggagagaggaaagaaagcacctagggaggctctgatggttggctagcccctggcctccttagccctgggcctggagtctctgcagactgacaggagggtaggtaggaagcaggtgtgcccaaagggccaaattacgagacaaatgaggttccctcccagccggcacccaggaagccaggttttctatcaggccatgccttccccaggaggcctgcctggccggagggaggaggggctgggggcagggactcctgggtctctggggagaaggaggctttggatctggactcatgagtctgagggaggaaggggctgagtccttggattccaggaacatttggggagaaaagggccagaggcctggattcctgggtctgtggtgaggaagggcctagacttctgggttctttagggaggagggggatgagagccttgactccagggtccctgatgaggaaggggctgagggcctggactcctgggttccttggggaggaggggccgggggcccggactcctgggtcctggcacccacccgtagaaccgaccttgcggggccttcgccgcacacaagctcgtgtctgtgggtccgtgtcgggggctcaccatcgcggctggggcctccccggccctccccctcatccctggtcctcctggtccctgtctgtctgtctgtcgggtctgtccacctgccgcgccccccgggctgaggtaggaggttgtatagttgaggaggacacccaaggagatcactatacggcctcctagctttccccaggctgcgccctgcacgggacggggcccggcggggacccccagccccactcagggacccttagccccactgggctgccccagggaccctgggaggaagagccgggctcttttctgtccttgtccctgcatcccctccttcccctgaaatctgttttccttccctgtctgtctccatctctgctgtgtctctgtggcttctgtgtctctttcacagtggatcctctgactccctcttattctggctttctaggtctctgcccctcccgatatctctctgtgtctctatttctgtcgtttttggtctttctgtctctggctctcagaatgtctctgtgcctatctccatctctgacccccaccccagggtctaccgggccaccgcacaccatgttgccagtctctaggtccctgagaccctttaacctgtgaggacatccagggtcacaggtgaggttcttgggagcctggcgtctggcccaaccacacacctggggaattgctggcctgacttctgacccctgactcctcatacccttcctccagagcatgacatttgaccaccaactgaaacctgacctctgaccccagaccactggcccttcccccgccctgtggtgacttcataaaggttactagcttctcccctggccttgagacccacacgatggccctgctggctctggccagtgccgtcccgtctgccctgctggccctggctgtcttcagggtgcccgcctgggcctgtctcctctgcttcacaacctactctgagcgcctccgcatctgccagatgtttgttgggatgcggagccccaagcttgaagagtgtgaggaggccttcacggccgccttccagggcctctctgacaccgaaatcagtgaggagaccatccacacttcatcagtgtcctggggaaggtgcagagggagggcaggagaggcccagagggtcaggctgagggacagacagagagaaacagtcagaggagaaaggctcaaagaccatgagaacaacagagacttagggacagagagacacagacaggggaagacagcagggcaaagactcagagaggggaggatggagagtcagagaggggaagatggagactcagagagggggaggatggagactcagagagagaggaagatggagactcggaaagatggagactcaggagtatggagagtcagagaggggaggatggacactcgggaggatggagagtcaggaggatggagactcatagaaaggggaggatggagagtcaggagaggttggagactggagagggaatagagacccagagaggggaggatggagactcagagggtggaagatggagactcaaagaggatggaaacccagagagaggaggacagagatgaggcagagactaggggaagcaggatagcgactggtcgggggcagagactcagggaggatagagacttgggagggactcaggaagcatagcgactgtggggcaaagagtcagagaggggaggatacagacttgggagggcagagactcagaaacagaatgttcgcattagggacatggtgttgcggggagctgcctcccccagcccctgctccctccctcaccgccagactatgatgagagaagccacctgcatgacaccttcacccagatgacccatgccctgcaggagctggctgctgcccagggtgagtgtgtggggatggggagatgggagatgtggacttggagcccctaagaaatgggtatgtgggagggcccagggcagaggaaggaggcccccagagttgggcagtgatccgggaggggaaagctgggaagacattgagctcagctacttgtccaaacgaaggctgaaggcagctctaagagccaggggctgaaggtggtgagggggaagggacgctgcagaaattgcctagagctggaagtccagatggggtcgggtaggcataggttctgccatggctgcatggctcacactcttactggctatgaagttctgggtgtgtcactgcccctctcctggcctcaacttacccatctgtaaagtgggacaatcttcttgcctcctaggatggccatggagctcagtgcaggggttggggctgcctgatgagcctgatcttagggaaggcatcttcctctaggatagaacacacacacactcgcacacagacacgctcagagacatacactcacactcacacacacacacagatttcttataaagtgattccacatttttgaggtgtgaggcaattagagggcgggaaaacaggaacagcagagtggatcactcaggtgacagcagtgaaaagagacaaggtgtgactgtcctggtgagacaggcacatgtgacagccttgaggtgtgtggctgtgcgaagagacctcagggctgggggccacgcaatgccgatgggcagcatgggcggtaatcatgcctgatcaccatggccatgatccccacgaggtgccagaccctggaactgtggaggctcggagttgcaggagttacagagccctgcgctatagaataaactggcttcctcttaggtccaggagctcagggcttattcccacacccacagtcgctccttttgcttcctgctttgccctccaagcgtcctgtcaacaatcccggaagagggaaggttcccatccacccagggggcatccagggccagcctggagaaggcctcagctgtggctctccccatctccaccctaaagggagacctgaggccctaaacctctccatgtgggggtgtgcaggattccaagaaatgccctttctccccacataggctgccttgttacagaagcttttgaaaagatgaggaacctttggatctgggaatggaagccttctgtggggccgcatgggggacaaacttggaggggagagagaagaggctgggtgagggtccaggccagagcggaggcccgagtgggggctggggccgtgaaggtggagaagggccagggccagagagttaggtctgctgggctgttttgggaagcatagagaacagcatctgagacaggtcctgctctgtgcctgttgggcggtgggtcatcaccgaaataaggagcctgagagaaagagccgggggcagatgataagctgggttagaaggcagtgactttgaggggtcccagggacgtttaggaggcagctagatacctaggtgcagagttcagcagaaaagtcagagagtgttgagtctctttcctcagggcgctggggagctgcagcaggagtgtgagcagtgaagaagtaggggcagctctgggtgtagaaagaaccctctggggtcgtgtcaaagatggaccagagggagagtctggaggccgggagaagctggtgcaatacgttcaattatacttactgaatgtgccaggaacaaccgctgtgaccaaaactgcaaaccacctgtcctcgggttgcttatattggggtggagtctggggagatagacaataaacataatcgataaaatatcttagtatcttagtatgtcagttggtgatccctgccatggaggaaaacagagaaggggaagagaaaggggtgatagtttttttgtttttttgagatagggtctcactttgtcacccaggctggattgcagtgatgtgattatacctcactacagcttcaaactcctgggctcaagcgatcttcctgcctcagcctcccaagtagctgggactataggtgtgcgccaccatctttggctaattttttaaatagtttgtaatgatggtgtcttgttatgttgcatgggttggtcttgaactcctgggctcaagtgatcttcccacctcagcctcccaaagtgctgggattacaggcatgaactaccgtacctggctgggtgataattttaaataggttggtcagggcaggtggaaatgacagggtccagttgagcaaagacctgagcaaggtgacagtgacagcgacagccatgcagataatctgtggaaagagattttcaggccacagggaatagccagtgcaagaccctggggcccgtggggctggagtaaaggtgaaatcagagagatagcaaggggccacctcctgtagatcctcatagacagggggttctcaagccccagcatacatcagaatcccctgggagcttatttaaaatgcagatttctgggcttcaccacctctgaccaggaggtccaaggtagggcccagacatggacgtttctgtcaagatcccagggaatgctgatgctgctgctccgggaacactctttgagaatcactgttgtaggcccttggaatgacttttgttttttgctcttgaaatgggggagctgttggaggactttacacagagagacaggatctgacctgggatttaacaagatctctctggcagctgtatggggcctggacaaaggcaggaagacttccagtgagaagccggcccatggtggcttggaccagtcacagtggtccgggggcccagatgaggtctgagcagagtggggtgggcataaggatttgaccgtgtgccaggcttgcccatgcgtgcaaaaggctgtgtttgccatacacagagtcattcatattaagtatcttcctaaaggatatcctctaccggccctgtgaggctgggttttatagccccgcttatcagaagggaacgctgggctcttctggacaagaacagtaggcccaggatatatttggagatagactggaccagatgtaggtgggtgagggcaatgggaagaatcaaggatgacttttgcgtctcctccagagggagcagcagggagatggaggagctgatgtaggctgactgcctcttggtgatcccaggtgatcttatttgtatatatgtatatataaaccatggagtagatgacgtggtacagactggatgcagtattaggtgtggagattatgtatgcagcgattaggtgtggaggctctggagcctgaccaccagggtcaaatgtagccatgtgattttggaccacttctctaatctccccatgcctccgtttccccacctcaaacttggagatggcaatcctaagtttgccagccttctctaacactcactacgtgctaggagccattctacacacttagtgacaccatctcatacaatcattaaacgatgccatggaagagtggggatgaggatgctttcatggttgtatggcgtctcatcctcccgctaattctgtgatacagacactgctgtcatcctcatttgatgaatgaggaaactgaggatcaggaaggtgaagtcacttggccaaggtcgcatggggaggagggcttgtgattgatactcagatctgagacaggtgtgctcaagacggaagcaccaggactcagacccagatgatctgaaccagggtcagagctcctgacgatatgcaactcctctgggggagactttacaacacccacccatgccgccttatggcccgcttgctataacccaggccacttggcctgttcggaacatttcactccacttatactcccctggtggagtataagcccacccggccaccatggcttacttggtatatcccacgctcaccctgcccatgagtcatttgatttggcacatagaaattctttggatgactcctccaacatcctggcctctcatttgtgcaccccagtctgaccacatgctcctgatcatcctgccatcttgagaccacactcctgctctgtggccaaggagagaccactgggtcctcatttggaacccacttctgggcatcagtgcttcctctctccaagtgtatatccagtgatcattgttttaggcactttcttgccaatatcctcagttccctccctttttgtatggctttaatcacagaggacgctttcccctgtccctgcaatggctttaagcccgtaggaagtttagctctcctatataaagtaagtcttgtggtaggcacttaaggctaatatggcacctccatttcttggggatccaagctccttcaagacttaatatcccagggagtagcccttgtcctcatggtcccgtgtggctgctagagctccaaccatcaaaacaaattttcaggcagcaggatggatgaggggaacaataagatggcaccaccttctctgtctttgttttttagagacagggtcttgctctattgcccaggctgggtggagggcagtggtgcaatcatagctcactacagccttgaactcctgggctcaaccatcctcccacttcagcttcctgagtagctaagactacaagcacaccatcacacctggctaatttataaaaatttgtttagagatggtgtctggatatgttgcccaggcttgtctcgaactcctggcctcaagtgatcctgtcacctcagcctcccgagtagctgtgattccaggtgcggtaccacctcccttttaaggccacctcctgtgactcacataacacatccatttgcatcctatggctacaacttggtcacatgaccacaactgcaaggaaggctgggagatgaagctttttatctgtgttctgtggatataggttatagatatataggtatttggaggcagtgaacaattcctgtgtgttggtttgctaggaccactgtaacaaagtaccgtagactgggtgactcgaacaacagaagtttctgccttctagaagtctgagaccaaggttttggtgtcagcagggttagtttcttctcacgcctctctctttggcttgtagatgccttccttcatatgtccctgtgtgcatctctgtgtcctaatttcctcttctcataaggacaccaatcatactgcattacagcccaccctaatgacctcattttaacttaatcacctctttaagaaccaagtacagtcacattctgaggtactgggagttaggacttcaacatacaagtttggttgcgggggatggggggtgggcggcacgatttagccgataaaaccctgccacattactgatttccacaaatcaccacgagatcaagtcagctgtctattcttattccactggaacaagccacaaacccatacaatttggaggccattgcagtggtcaaaacacaaggccaggcatggtggcccacacctgtaatcccagcactttgggaggccgaggcaggcggatcacctgaggttaggagtttgagaccagcctggccaacatggtgaaaccccatctctactaaaaatataaaaattcgccgagcatggtggtgggtgcctgtaatcctagctactggggaggctgaggcaggagaatcacttgaacctgggaggtggaagttgcagtgagccaagatcacaccactgtacgccagcctgggcaacagagcgagactctatctcaaaacaaaacaaacacctacaaagacaaggaacataaaagagtaaaagatgggtaaatatagaagtgaatagaggctggggactatggagaagtggccggtgtgtgccccatttcaagggagtgactgctacccatctccagctaattgctgccttatggaaatgcgatctctgtgttacagctcttccaactttgtaaaaaagagatgccaaacgttttatttgacattccaaattttatatgttggcaactggttcattttcttttaaacactttccaggccaaatataacacatcccagggatggatttgggtcataggccaccagctggggtctccagttcaagttggatcctggaattcattgtacaaatacttactgagcacttctaagactgagggccctctccaggatccagaggacacagtgctacagaagaacatgtttatttacttacgagacagacataagtgatcatcatctatatataaatatatgtaattgcagacagatgagagctaggaatgaaatgattgcgatgagagacaaaaacagggaacttggttagatttgtggtgatggaaggatgattaggagaaggaaaaatgtgctaaaaacaagccagcatgtgcaaaggccctgaggtgctagggaatgtggtggttttcatattaaaggaaatgaggccaggcacggtggctcatgcctgtaaccccagcactttgggaggctgaggtgggtggatcacttgaggtcaggagttcgagaccagcctggccaacatggtgaaaccccatctctactaaaaacacaaaaattagccaggcgtggtggtgcacacctgcagtccctgctactcgggaggctagggcaggagaatcacttgaacccaggaggcggaggttgcggtgagccgagatcgcaccactgcactccagcctgggtgacagtgagacactgtctgaataaaataaaataaaggaaatgaaaggtgggcagtagggatgggacagggagggagggggaactaggccaaaccatgtaagacctaataggccttggtgaggaatttgatctttatcctccccttctccccccaacaagctacatgcaggtgatgtccaggaggacttccatcctggagagattcaggaggcagaagaaaggagacttagggacttgttagccttcaactacagagggcgggtgatgagaagaggagcagagaatatggtaatgagaggggtgaagaggggccagggaagggcagataccatgacagtacgtcctgtgagctagggccagcctagccctagccaggctagatcagaatgcaggaccaaggaccaagccctgggggaagggctttactacacaggccgtcctcccctccactctccaggatcctttgaggttgccttccctgatgctgcggagaaaatgaagaaggtcattacacagcttaaagaaggtaaaatacactccatctctccttccccagacacacacacacacaattagaaaaccccacttttggccggggatggtggctcacgcctgtaatcccagcactttggaaggctgaggcgggcagatcacttgagatcaggagttcaaaagcagtctgaccaacatggtgatacccatatctactaaagatactaaaattagctgggcgtggtaacgcatgcttgtaatctcatctactcaggaggctgaggcaggaaaattgcttgaaccctggaggcggggttgcagtgacccgagatcggcactccagcctgggtgacagagcaagactccatctcaaaacgaaacccactcctgagaccccccatccactccccgtacaatcccctggccccatctctgagcctcagaccttgagggacgactatttccccgcgtggaccatttttgatctggccccgccccttcgatgaaaggtttcgtctccaactgagcccctttccgggactactactaacctggccacgcctcttctctaactgggccaccaccttagccttggtctcctgcaaggatcgcccaggatctagccccgcctcctcggtggaatacacctggattgcccatccccatcagggcctacagaaaaccagtgtgtttccctctaaaccccaagtagaaggctggcagcagtcctgggcctgacctcctagtggaatgctcaggcttggccccggccccaggtggaacccagccggcttgaccccgcccccaggttatgacgaaagcttggccccgccccctcggagcaatgcttcgggccttgtaacattagctaggggagcatcgggcaagggttcttcccatgactgtaaggtagtgatgtttcctcttcctccacagcccaggcttgcatccctccctgcggtaaggacttcatctaaaacttggaaattgcggggtaagggaggcggtcggggacgaaacgtacgacatcaagtgtgggaaagcgggtgggcttcacatccttaggaagccaataagatccctggagaaaaggaagaaaaccaagtattgctctaaatcctcagaaggtgtgtgtgagagccgaagcaaaccaataggaatcctagagggcggagaggagtgagagtcggccaaagacagcagggagggcggggtcaagatgccacctggccgatggaccccgggaagctgcatggatctcaaatgggccaagggccccgggcttggaagggcaggtggcgcctagacccagcgttcccgctccacaggtctccaggagttcgcccggcgtttcctctgcagcgggtgctactctagggtctgcgacctcccgctggactgcccaggtgagggggcggggcctcggggtgcaggaggccaacctgagaaaagggaccagagcaccgaggggcataagctggtggcgaggccagacgtggtcggggcccagcgagtgaaccctgctccgtcttcagttcaggatgtgacagtgactcggggcgaccaggctatgttttcttgcatcgtaaacttccagctgccaaaggaggagatcacctattcctggaagttcgcaggaggaggtgtgagtcggggcggggccggcgcgaagagtttagacgggcgagttagccttcactagaggttggggagtcagcttgcggggacgggactccgggaatctccgtctagacacaagcatcagcaagaggagggtcgcgggatttaggggagagctcgaagatcagaatgcaggaccaaggacctggggcgatggctcacgcctgtaatcccagcgcttttggagaccaaggcgggaggatggcttgagcccaggagtttgagaccggcctcggcaacaaattaagacccctcctctgccaaaaaattttaaaaacagccggggcgtggtggtgcacgcctatagtcccagccactggggaggctgagcgggaagactgcttaagtccaggagtttgaggctgcagtgagctatgatcgcgccactgcactgcagcctgggcgccagaacgagaccctgtctggaagaaaaaaaaaatacataaataaaagcagtttctaggggtaggttatgcgtaagggtttaaggagtgaggggaaggggtgcgtttagggcaggggagcgagaaggctcgggggcgggctcaaggctcagggccaggactccagggggcgtggtctggctcggggggcggggcttgtaggttactcagtggcaagccggagttgaggcgtttaaacccgcgtgtcccgcagctccggactcaggacttgtcctatttccgagatatgccgcgggccgaaggatacctggcgcggatccggccggctcagctcacgcaccgcgggacgttctcctgcgtgatcaagcaagaccagcgccccctggcccggctctacttctttcttaacggtggggcggggcgcggccgcgtgagtgagcggggtcgggagaggggtggggctcgtgcctggctgacgtgcgcgcccccgcagtgacgggcccgcccccgcgggcggagacagagttgcaggcctcgttccgggaagtgctgcgctgggcgccgcgggatgccgagctgatcgagccctggaggcccagcctgggcgagctgctggccaggcccgaggctctgacgcccagcaatctgttcctgcttgcagtcctcggggccctcgcatcagcgagtgcgacagtgttggcgtggtgagttctggggactccggagccccagcatctagctccccgctgtctcagatcccaccgagaagtctgggttcccagcaacctccaacccaggaggtcaggctttcagttcctcctctctcagacccacgagtccaggtcccagcccctctttactagcccaggaatccaagtccccagccccctcctcccttagatctaagagtccaggcccccagcccctcctccctcagacccaggagtccaggtccgcagcccctcctccctcagacccaggattccaggccccaaacccctactccttcagacccaggagtccaagtccccagtcccctcctcccgcagatccaagagtccaagcccccggaccccctcctccctcagacccaggagtccaggcccccagcccctcctccctcagatccaagagtccagacccccaagtttctcttccttcagacccaaaagcccaggccccctgccccctcctccctcagaaccaggagtccgggccctgtacacctttttgaccctggtgtccaggctccgggacctaagtttctagtcaccaacccctcctgtaacacacatacctctttgtttccccaggatgttctttcgatggtactgcagtggcaactaacaaaggtatctttcctccttccctatcctatttccatcctgaaaataaagaatatatttcaactctagattgtttcatctccgaaggtggtcactactaactcaggtaggaggaggtgcagcaagcccacacatgcccagatgaatatggcccgcataatgacagtgataggcatagctatcccagtgcaagttaggtgggaacccagataccccctcaggttactggctgtctccttgacatttccatctgcagaaggcaccctcaaatagagtcctccatgttgccctcagaggctgttcctccccaaggctttcctcctaccagaaagagcaacaccatccacctagcagttcaaaccagaaaccttggaatctaacttctcctccacttccaattcattttcatttccaaccctcagactttttaactcctaaatatctcatgaagctgccttctctgtggtcccagtcacccccacctcatgtctggatcactggagcagccccccaccacctccttggcctctctccactgtagcccattctctacataccagcaggacttgttttattttattttatttttttggaggcaccatctcactccaaggcccaggctggagtgcagtgatgtgatgtcagctcactgcaacctccacctcccgggttcaagcgattcttctgcctcagcctcccaagtagctgggattacaggtgcccaccaccacacccggctaatttttgtatttttagtagagacagggtttcaccatgtggccaggctgttcttgaactcctaacctcaagtgatccacctgccttggcctcccaaagtgctgggattacaggcgtgagccaccaagcccggccaaggacttaggttttaaagtgtgtcagattgggttactcctctacccagaatcctttagtgactccctgttgccattgagacaaaatccaattccttgtcaaagcctcagaggttccacaggtctggcctttgctgacctcaccagcagccttgtcccatacccctttcctccttgatcttgccaccctgcggtttttctctggcctttcctccttcctcgcattcatcatgatacttcttgccctctctagggtcttggttcacactgtttcctgcctagaataatattttctccttttttttgtctagttaactcttatgatttcccctgagtagccattacatctattaaccccgctaatccccttgacaagtctgcgcggctggcactgtattgacttaactgactctacctctccctcaggccccttgctactttccagccccagtggcctccttattaggtccctggaacatgcaagtctcagtcccatttccaggcctttgctgtgcttcatacttgaaatgactttcctctgagtatcacaaacccacctctctcattgcacagatcccagatcaaatgtctccttctctaactacctctctctccctgtttgacattgcccaatttcaccttgttcactgagctcatctggacctaatgttaactcttttttttttttgagtttcgctcttgttgcccaggctggagtgcaatggtgcgatgtcggctcactgcaacctccacctcccgggttcaagcgattctgctgcctcagcctcccgagtagctgggaacacaggcatgcgccaccacacctggctaattttgtatttttggaagagacagggtttcgccattttggccaggctgatctcaaactcctcacctcaggtgatccacctgtctcagcctcccaaagtgctaggggattacaggcgtgagccaccgctcccagccgttaactcattttttaatttggttttgcctttcctacctgaaagggaagctccttttgagcatgtactcattcttgttcactggtctatttccctttattgatttgctcattcagcaaatatttattgagtgcttactattttgtcatgtattttcaaggcactgtagagatcccaatgaagaaatcagaagagacaaaaagtttgtacagtactcacatggaacttacattctagtggacagtaaaacaaaactgtttctctctctcccttttttttttttttttgttttgtttgagatggagtcctggagtgcagtggcacaatcttggctcactgcagcctttgcctcctgggttcaagcaattctcgtgcctcagtgtcccgagtagctgggactacaaaggcgtgtgccaccatgcccagctaatttttgtatttttagtagagacggggtttcaatatgttggccaggctggtctcaaactcctgacctcaagtgattgcctgcctcagcctcccagagtgctgagattataggcgtgagccaccgcgcctggccagaaaactgtttctctactctcaacatttctgacactacatgtatgggattctacctcctgcccccataccaaccagttctccaactctcccggacaccagttgagtgtcctataattcatttaattctaaaatcaacaacccagggttagcgtcgcactacacaggttttaagagctcaggcccacaagactgcccccacttcagacaccagtcgcaagccaggggctcctgcaacctgcagccccccagctcagtaatttgctagaatagcttgaataactcagggaaacatatttactggtttattataaaggagagtatgaaggaaatagcttaatagccagatgaagaggtagatagggtgaggtccagaagggtcccaagtgcagaagtttctgtctccatgggagctgggatgcagcggcctgtcagtgcgtggatgcactcaccagcctggaagctctgcaaaccccatagtttagggattgttctggaggctgcaccatgtaggcatgattgcttatgaacttagtctccacccctttttccctccccaaggactggagggggcagcgggtgaggccgaaagctccaagctcctaatcatagcctagtcttgctggtgaccagcgctcttccaggagaccaccaagagtcacttgaatagaacaaacgatgctgttatcacccaggaaattcaagagattaggagctctatgtaagacgcttctgttgcccacatcactccagaaagtacaagggtataagactgtcagaaaccagggacaaacaccaaatatgtatttcttactatgtcacagacaataagaaaacagtaaaatacgaaatatggtaatatgtgtgatggagaagataagcagagaaatggaatatggggccgagggaagtagcagtaggatctgtggagaagccctcactgagaaagtgacgtttgaataaaaacttgaaggggatgacggtatgagccattatggatatttgtgtgaagagtgttccaggtggccaggcgaggtgactcatgcctgtaatcccaacactttgggaggccgagacgggtggattacctgaggtcaggagttcaagaccagcctggccaacatggtgaaaccctgtctctactaaaaatacaaaaattagcctggcatggtagcacatgcctgtaatcccagctactcaggaggctgaagcacgagaattgcttgaacctgggaggcagaagttgcagtgagctgagattgtgccattgcactccagcctgggcaacagagtgagacaatggcactccggcctgggcaacagagtgagactctgtctaaaaaaaaaaaaaactgttccaggcaaaaatttaaaaagggaaaagccctgaggcaggagtgccaggcacatgggaggacagccgggaggacatccaggaggccagtgtagctggaacagggccttaggaagtggatacacagtgaagtcagagaccatggggaccagatggtgctgctggctgctataaagtctagacttacctctgtaagagatgagggtcggctgggtgtggtggctcacacctgtaatcccagcactttgggggaccgaggcttgagcttgagaggtcaaggctgcagtgagccatgattacatcactgcagtccaacctgggctacagagtgagaacctgaatcagaaaaaaaaaaaaaaagagcaaggtgcagtggctcatgcctgcaatcccagcactttgggaagccgaggcaggcagatcacctgaggtcaggagttcaagaccagcctggccaacatggtgaaaccccatctctcctaaaaataaaaaattagccaggtgtggtaacaggtgcctataatcccagctactttggaggttgaggcaggagaactgcttgaacccgtgaggcggaggttgcagtgagctgagattgcgccattgcactccagcctgggcaaaaagagcgaaactgcatctcaggaaaaaaaaggcaaaaaaaaaaaaaaaaaaagatgacatgagccatgactgcaccactgcagtccagcctgggctacagagcaagactctgtcacaaaaaaaaaaaaaaaaagaaaagaaataaaagatgagcgtcacgggtggcttttgagccaagcaagggcaggcaggtcatgacttgatttccatggctactgtgtggctaacagactggggcaaagtggaagcaggcatcgctgtgaggtgctgcagtaatccagggacgagatgcagccctggggaacaaggtcgtgaggagcagtggctctagatatgtcttgaaggtagaatcagtgggatttgctgatggttcagaatgttggatgagagaaggagagaggccaagagtaaccacagtggcactgtgcagtcaaaccctctgccatgttggaaatattctagatctgcaccgtccagtagcgcagcaccagccacgtgtggccgtgaagcatgtgaaaggtgacctgtgcgactgaggaactgaatccataatcttaggtagctcttcaggcaagaaagggtgtcaaaaaaaataaaaataagaaaaaaatcaactcaggtagctgtaataactttaacattacatagttcctgctctatgacaacagcatcatagaggcctatgtgagtattcttacctgtggctcactcttaactctttgtttacttgactaagagctccttgaaggcaagcttcttaattgtttctatacttgcagacttggcagagtgtgtggcattcagtaggtgcttggtgaatgttttggtgactgatgaatcaaagaatgcatgaatgggaaaaaaatgttttagacttccatgtggtagtggctagtgatggacagttacagctctagcattttttggcctgagcagctgggaggatgaagttctgtttactgagatagactgatggaggagcaggtttcacggggattagcagggaggaaggcgagaagatattaggagtctggtttgagatgcctattaggcatccaagtagaaatgtcttggaggcagttggatatacaagcctggaatttaagggcgaagtctggtctgaagatctgtttgggagtcccgtctccatacatggagcatgaatgaagtattcagagccataacactggaggcacaagggaaatgggtatagatgggtaagagacgaggatgagaggatccaggaaagaaaacaaggtggaggaaagcaaggtagctgtggcttcctgaaagccaagtagctatgcttggtggctcacacctgtaatcccagcactttgggaagccgaggctggtggatcacttgaggtcacgagtttgagaccagcctggccaacatggtgaaaccctgtctctactaaaaatacaaaaatcagctgggtgtggtggcacatgcctgtaatcccagctacttgggaggctgaggcaggagaattgcttgaacctgggacgcagaggttgcagtgagctgagttcacaccactgaactccagcctgggcgacagagcaagaccctatctcaaaaaagaaaaaaaggaagtcaagtaaagaaagcgtttcaaggaagagtgatcaactgtgtcagacacagccaaatcatgaaatagggctgagaattggctattggttttagcaacgtggatatcattgatgaacttgacaagagcagtttctatggagagctaggggaaagcatgaccatctgattggcttgggtttaagagttaatggaagtcaacatcattagtcattagagaagggcaaatcaaaaccacaatgaaagccacttcacacctgccaggaaggctgtaatcaaaaagtcgggtaatacaaaatgtagcaagggtgtagagaaattagaaccctcatacattgctggtgggaatgtaaaacggtacagtccctgtgcaaaacaggctagcagttcctcaaaaaaattaaacatagaattaacataaacccagcaattcaatttctaagtatatacccaagaaaattaaaaagctgtgcccacaccaaaacttgcacacgaatgttcatagtagcatcattcatacagccaagaggtggagatatcccaaatgtccatcaactgataaatacataaacacaatgcaatatagccatactgtggactattatttggccataaaaaggaatgaatcagtgatacatgcaacaacatggatgaaccttgatatgctaaatgaaggaagtcacaaaaaaaagcacatactgcaggattgcattgatatgaaatagccagaataggtaaatctataaagagaaagcagatgagcagctgcccaggtcttagggggataaaggggtgagaaaggagaagtgagctgccaatggatatggggttccttttgtggggtgatgaaaatgttctaaaattagattatggtggtggctgtgcaaacctgtaaacttaactaaaaaccattgacttgtacacttcttttttttagatggagtctcattctgtcacccaggctggagtgcagtggcacgatctcagctcactgaaacctctgcctcccaggttcaagcgattgtcctgcctcagcctcctgagtagctgggattacaggcacatgccaccatgcctggctaattttttttgtatttttagtagagatggggtttcaccatgttggccacgctggtctcgaactcgtgacctcaagtggtctccctgcctcggcctcccaaagtgctgggattacaggtgtgagccaccgcgctcagccaaattgtacactttgagtgagtgaactctgtgcgagataaattggagacaaatatggacaactctcccaaggaaatttgctattaaccgaaatagaaatggaacagttgtttacagggaaactgaggtcaagagtgggggtcttaaaagtgggagagtaacaatatgttcagatgctgatgggaaaggctccgaagcgaaaggagaactgacggaggatcaggtgggaagaactgctggagtgaagtctttgagcagacaaagaggacatagggtctggtgccctgatggaagaggttggcactggcttggagcacagacaggtcaccctcagcaacaggaagaaggtggagtgtatggacacaggggcaagtgagtgggaagacgtggagatggggactccagcagaagttttcttttttaacccctattttctcagtgagataggaagccagctaagagggaggggaggaggtgctggaggtttgaggagaaaagggatgtgttacccttctaagtagacggaccagagacaaaagcaccatctgcagtacctgccagtgtgcggcaggtggcaggtgcttggtaagtacccgtgaatgagttgagtaatttaaccctcacaccaaccctgccccaggggattaataatccctgttttcaaaagagggaaccccaggttccaaggaaggagagtgtcttgtccaggttcaaacggctagcacccagcactgagcccagcgtccccaattctcaatcatccattccccttagttctcaaaaaggtggaggctgggggaaaataaataaaattctttattacatcctgatcacacagtagaaatggagattaaataagaacgaggagaaagcaggaccctttccctccactcctcagatcccacaccctgaccaataaataccctccctggagacccagaagtcccagtcccaatatagtccagactgaagaatcttgggctgaccccctcgttttgcagaggagggaaactgaggcccagagaaccacccagcaagttcgtggctcggggcccagcagctctcctctggcctcccctgaagacccttgaggcggcatccgcgtggctggactcacacctggacgcggtagcccccggtccgccgccggcaaagcctccgcacgcccacccagtacagcgtcaacatggccacccagtagcccacgtaggcgccggcccccgcggccaagtggtaggcctcggctgcgcgggaagggccgctccagtcggccctggcctcgtgtgctacgctgcggaccaggcccccaagcagcagcagcgcccagagcgccaggggcagcagagggacgtagttagcggccagcttccgccggcccgaggtgccccagccactctggttcatggtgactagcgccaggaacttggcaggcaggaggccacacatgtagaggggcgcgtagagcgacagaagcaccatgcgcaggcagccccgcagccaggccgcgaaggccgccttggccagtgccacgccctgcacgcacagcagcacccacagcagcgcccaagggcggcccgcgtagaacagacgcagcacagtggccgccacgaagaaggggaacaggccggagaccaccgcctcgtaggtcatccacgcatggtgccggtgccaccagagcgcgttgtacagccactcacggaagtacgacttggaccagcgtgtctgctggctcagccaccgcaggaaggacgagggcgtctctgagtagcagcgggacctggaggtgtacctgcacgggggcgaggaatgagggcatcatcgcgtgctccctggggcctgggcaggattctggaggcagaaatgaccactgtggacggccactgggggcgagtttcttaacctctctaggcctcagtgttctcatgtgtagaatagggtggataatggttcctaggcctggacgcggtggctcactcctgtaatcccagcactttgggaggctgagggataaggagttcaagaccagcctgggcaacatagcaagaccccatctctactaaataaataaataaataaataaataagcaccaatgggtgggatgcaatggctcatgcctgtaatcccagcactttaggaggctgaggtagggggatcacttgaggctaagagtttgagatcagcctaggcaacatagtgagaccccatctctaaaaaaaaaaaaaaaaaaaaaaaattagccgggcgtggtggcctgtagtcccagctatttgggaggctgagatgggggaatcacttgagctcaggagtttgaggctgcagtgagccatgatcgtgcccctgcactccagcctgagcctgagcaacacagcaagactctatctaagaaaaaaaaaaaggctctcataagacaaggatactgtaaggattgaatgaaattaaacgccaagtgcttaggaccagtagatagtatttgctcaataaatgttagctactaccgtttttactatgactattgctgttaccattactattgctgttactaatatcatgttggttactgacactattactaatactatcactaacatattactaatactaccatgcttactattactggcaggccctatagggaggagcaagatgggtgtggttgctacccagggtagtctatgtattagaacttctcaagggaaccatcaggcctccttcctgttttgtggcagacatcattaatcaatccctgcatggtttccagccaagcccacacaagaggagaatcctgggcattacttgacagtgtccagactccttcccctgtgtcacttggcatcctcagtggcctccctgcttccgaccttgccttttgtagtctgtacccaaaacggctgccagagggatcccattacaacgtgtcacttctctgcttaaaaccctcccatggctccctcatcttagtcagagtccttagacctataagcctttcatgagtggaccactccttaactctccatcctgctctcctaatactcccccagttcagtgctccagccacactattctcagccttgagccccatcctacctcaggcactccacttaacacttcacccccaaccccaaaacttcctatccaccacccttgcccggcattatttatctccataacacatatcatgaacatactgtatgttctacttatttatttcttgtgtgtctccccaactgatgtaatcaattggtgtcctgtctgcctattgctgtatccccgcagcttaaacattctaggcacctagtgaatatttgttgagtgaattaatgcatggattcccctggattatcccaagtttcctctgggtatttcagtggacctggctttgcagaaatcactctcccctgaacttcacttggtctagatcatcctcccctgagtctcatggaattacttgtcttctcttgaagaacttactagagttcaggtgctcctcttctctcacttgtttctttctccgtggctctctcactagttagatcccactctatccatttgtctcttgcccttcctacttcactccccactgtgctaccttggtctccatgacagaaccaactcaccctatctcaattctaggtggaattctctaccctcaccttgcctctcttggtagagttcaccgcattccatggttcaatgcaaatgccagccttgtcccttatagtatcttcccctcttccctaatatctcacttggtagagtccattggctcaatgcaaatggcccctctgcccattatggtatcctcctctctcctctaaagtctcacttgatagagcccattgtctggtgagttactttggatttggagaactctcagcatgcacacacgctaggatattcattggcctccacacatacccgaccacctggtcccctcagcttacttggtagcataacccatgctgagcatgcggttggtgaggtgccggtcatccccaaaagtacagtgggtacccaggaacttctggttgtaccaggcctcaagaaactgctgcaagaggttattcctatataggcctgggtggaggggaggtgtgaaagagtgtcagcctctgctgtcaccaacaccaactccaatgctgtttccagccccaaccccatctccagttccaaccccatcctcagtcatcataatctcaatctcagcactatctccaatcccatctccagcccgaatcctgtcctcaacctcatacgcactccaacttgcctgtcattgaactatacccactgtgactgcaaacctgcccaccccagtctcatcaccaatcccatatccattctcagccccatccaaaacccactgcaacctcaaacctggctccaactctgtctttgactccaagcctatcccatcttcttccccagccccagccccaatcgtcatccatatcctttttccaacctcactccccacaccaaactcagcttgagcccaagcagcatcctcaccgccagcttccagttttatcccatccccaattcctgccctgctgcatctttgttcccaaccccagtcacatcctcagccccatccggcttcccttctccctttccaccccatccacagccctcccaatctctgcccctgcttacctagaggaccgctgatgcaggatacacagtggaagtagctctgacaagcccgctccacattgaaggctacccagtatcgcaggctgcttaggaagctgacccaggagtccagagggttaaggatccgcacgtccccaccaacagcccctacccgggggtcctcgtccagtacccgcacgagctccagcagtgccatggggtccaaccttgtgtccgagtcacagacctgtaaggtggaaggggccaggatcagcacagacccctgcatcaggctgatgcttgagaggaaggcatcaaggggtgcaatgcagctggggcactctgcaaccgatctgaacataattttgagattttttaaagtcattttcaatgtgtagtcacagtttaacatgtactccaagatgcacatccttgtatgaacatgaacaataagacatataccatctcctctggtgtgtgagtgagacccctaacttgctactaagcaatagaatatggcagaagttatgggatataactgccatgattatattacctaatatggaaatggtgaataggttttgcaatgtaattaagtccccaaatctcttgactataagttaatcaaaaggagattatcctgggtgggcctgacctagtcaggagaacctttaaaagcagacctagaagtcagagagtctccttgctggccttgaagaggcaagctactgctaccatgagttctatggctgcaagaaagtgaattctgccaaccaacaaatacatacgcttgaaagataaccccaagccttaaaaaagacccagctccagctgacaccttgattgcaacctggtgatatcctgaaaaaaggatccagttgagctgtgctgactctgggctcatagaaactatgagataataaatgtgtttcgttcaagctgccaaacatatggtaacttgttatgcagcaatggaaaactaatataatgcattagaattgctacaccaggccaggtgtggtggctcacacctgtaatcccagcactttgggaggctgaagtgggcagatcacctgaggtcaggagtttgagaccagcctagccaacatggtgaaaccctgtccctgcaaaaatacaaaaattagccaggcatgatgacaggtgcctgtaataccagctactggggaggctgaggtgggagaatcacttgaacccaggagacagaggttgcagtgagccgagattcaaccattgcactccagcctgggcaacggagtgagattccatctcaaaaaaaaaaaaagattgctacaccaaatgggatggatgaatgagataaataaatgaaattaatctgtatattgaatacatagatagatggctgagtggttgaatgaaagaatctcaacactgaaggaggggaaaggaaggagggaagaaggaaagaagaaagggaacaaatctccacatttaatagataaatgaatgaataaatgagtaaatgatctccatattggatggatagatggtatatccatgagtgagtaaagaaaaagaatttctacactgaatgaagtaaggaagaacttttatttatttatttatttgagacggagttttgctcttgttgcccaggctggagtgcaatggtgcaatctcggctcaccgcaccctccgcctcccgggttcaaaagattctcctccctcagcctcccgagtagctgggattataggcattcgccaccatgctcggctaatttttgtatttttagtagagacagggtttcaccatgttggccaggctagtctagaactcctgacctcaggtgatccgcccacctcagcctctcaaagtggccggctggaagggtttaattttacattgaatggatggataactgaatcagtggatgaatgaacaaatgaatctctatattgaatggatggatagatgaatggatgagtcaagaatgagtgaaattgtctcttcctggaatgcgtaggtgaatgaaaaaaggaaagaatgcctctacattgaatgggtaaatgaatgaataaatgaacgaatgatctccatattggataaagggatagatggatggatgaaagaatgagtgaaggaaagaatctctccactgcatggatgaaagaataaagaaagggagagagtcattcaaatctgtacattgaaggaaagaccccaggaaagtgggatttgggtgttcgggtcacgagtgggctgaaggcgcctctactcacctgcacgtagtccaccgaatctccgagcgccttgaaggctgtgtacatgacctcgcgcttgccgccccagcgctgcgccacgcacacgcacctgcgagtcctcaccagcgcctccactgccagccgcccaggatcctccgcctccacctcccgataggctccggcgcccaccgcgcccgccgccgcgggttcccagggctggtggtagttgccgtcccacacgtacgtggcggggtcctcgtcagcgaagacctcgcggaacatgtcgaccatgtagaggtcctcggcgcggttgccatccaccaccatgaggacgcgcagccgcgcgcgcgggtacagcagggcgcgggcggacgccaggcactggcgcaggtacgcggggtcctcctggtaggcggagatggtcagcgccacactgcgcgcggtggctgcatccagcggcccccgcgccgccgccgccacccgccggtgctccaggtacgcgaagaggctctgcgccaccaggtgcgctgaaaggaaggccccgtagaggccgaaggccaggaggccgtagcgatcggaggccagcggcaccccggcggcgtaggcccaggtcatgaggcccaggatgagcagggcgaaggcgatggtcagcaccctccgggccaggccggagcagcggcaggctgcaggagtgggcttgggcgcgtcctgctgggagcgagaggggaaaggaaggggcatgagtcccgggcgcatgagcctcctccgagagaagattaaaaatcctttccttccttccctccttccctttccctcccctccctctctctctccctccctccgtccttccttctctttatctttctctctctctgtgtctgtctcgctgtctctctctctctctcgctctcgctctccctttctctctcctttcgttttttgttttttttttcttttgagacagggtctcactccagcctagtgtcgccatctaggctcactgcagcctcagcttcccgagctcaggctcagcctcccacctcagcctcccgagtagctgggactacaaagagtgtgccacaactcctggctaatttttaaatttttggtagagccgggggtctccctacattacctaggctggtctggaacccctgggctcaagtgacttgcctgccccggccttcctaagtgctgggattacaggcatgagctacctcgccgggccccaaaattattttcattaacgaaaataattggagcaaatagctatctaggcttcatgctgattagattccttcttttcattattatttatttttatagacagggtcttgctctgtcgcccaggctggggtgcagtggcaccatcatagctcactgcagcttctaactcctaggctctggcgattctctcacctcagtctcccaagaagctaggaccacaaggctggagtcactatgccttgctaattaaaaaaaaaacaattagaggaggggtctcactatgtctcctaggctccagtctcccaaagtgctatgaatacaggcatgagccaccaagcccagcctgattttgtttcttccaatacaacttttttccacgttttgaaatctcttaaatccgtgaggatgattgcatgcgatggagtgtcacaatttaattactagggcgtttccctcctctttcttagtggcacatacaatgaggatttatctcccaatcaaaggtttcttagggttgagacagtaataataataacacatactaaaaaaccaaaatgctgtgtaccagtccctgctctaagcctttaagatgaatgaatttattttaatctttacaacagcgctgtaaggtaggtactgttattattatccccgttgtacagatgaggcaactgagtcacacagaggttcagcaatttgcccaaggttgtccctggaaagcagaggaacctggatttgaaccctaggaactgaatctctaaacctctagccctcgggagagccctgggggacagatagtgctctgccaccatacaggtggccaaactgaggactgattggccagaaggagtggcttgcacaagatcagcagcccatggtagaggactcttctctctgactttccagaggcatagcctggttctccttttccactgcccaactccccagcagagccaggtgccccagtaaatgttgctggaagagcccagaatcagaggaaaaagtactttctgtgtgccagacactactgtacaacaaccttaatatatatatataaatttttttttaaattgagacagggagccagaaactgtggctcacgcctgtaatcccagcactttgggaggcggaggcgggtggatcacctgaggtcaggagttcgagattagcctggctaacatggcgaaagcaaaatacaaaaattagccaggcttggtggcgcacgactgtagtctcagctcctcagaaggctaaggcaggagaactgcttgaacccctgaggtggaggttgcagtgagccaagatggcaccactacacttcagcctgggtgacagtgcgagactccatctcgaaataataataataataatagagacagggtcttgctgtgtttctcaagttggtctcgaactcccaggctctagcgatcctcctgccttggccccctaaagtgctgggattataggcgtgagctactgcacccggtctctacaacaatcttataaggcaggtaccttcactgtcttctgttacagatgaggaaactgagacactgagaggcaaatacttttacccaaggtcactcaggtaataagcagagtcagaagtaaaactcaggcagtctggctctggcgtcccctctacgctaaactgcctcctatgccaccagttcctgcctcaaggcttactgtgggttatttaaatgcgtcgttaagatgtagatctttgtgtccaacacaggtgtcagcagccacatgtgtctaccgagtacttgaaatgcagccagtatcaccgaggaactgagttttaaattttatttaattttaattcatttaaatttaaaaactcttacttgattcggttattggaaagattttaaatatgtctggaacaagttgcatctacgatgccccttttataattgtaaatcttataaaatctaaacacagattaggtatttccagtgaaaaggtagcatctaagtgagaagtgctatgaacacactggattttgaaggccaagtctggggaaaagaaagtaaaatagctcattaacatttatgtattgattacatattgaaatgatcatatcttatatgtagcaggggtcggcatgctaagacctgctgcagcctgcaggctaagaatttgtgtgtgtgtttttagatggtttttgaaagccaaaagaagaataatagtttgtggagcatgaaaaatatgaaattcaaatttcagtgtccttaaaggaagttttatttgcatacaaccacattcatttgtttatacatcatctgtggctgattctacatttaccacatcgaagttgagtactttcaaaagagaccagatggcccccaaaagcctcaaatatttaatattgggccctttatttaaaaaaatgtgctggcccctgacacactgggttaaataaaaatatattattaaaattaatttcacctgtttgtttttactttttcaaatgtggccacaagaaaattttaaattagatattgtggttttcgttacatttctagaggacaaaactgaggtacagcttttaaactctcaacattaaacattattctttcttctcgaatcccccttctctcttcctttgcttcaaacctggccttgcctgagttcctagggatggctcaattcatgctggggatccagagagttgattccagaaacacagatgaacacacgtgtagacacactcccccacacgtgaactcacacatgatgagtgacacacagaatgaaattactcgtgttctacaggatgacccgagacacccactcaggccaaacacagcgatcccgtgacccccaccgacggccacacaggtgaacctgcagacacacacccctcagcaggaaaaagcaacaccagcaaaggatgtccacgtggccacaaacacacagagccccaactgagagtctggggcaatgggatgcacagggaagatttcaagagaaatagtaggtgactgtcaagctgatactgaaccagatgaaattgctattcttccaagtttagagtggctcagtatcggcgatttcatttggttcaacttaatagctattgaacgcatgaaacagaaatccattcccatgtgccacaggcaaatccaactctctttctcactcagtctctttcattcgctcactgtcgcactccctctttctctctgcctcccagggaacatagacatacacaagtttgtagcaagatacgcagatacagaaatacggacatggcacgtctcacctacatgtacttgggatggccgctcacacagggcaatgtatacacagacctgcacactcagcctcacatgctcactgtcccctacacacatatggtcactgtcaggcacatggatacacacatgaaatcatgcacacacagttccccaacacacgtggtcacacatatggcagtagttttccccacatggctgtatacacacacacacacacacacacacacacacacacacacacctgtctcatcgcagtgggtctggccgggctctctcttctctccggcttgctctcccagcctctctgtggccagagagctggaggggggtcatttgaagaccagcgcaggcgggggcgggagcgagcgctgacgtcagtcaggctaagctgggccaggggctctgaggtcacggcccagccgggcagctccacccgcttcccgctattactcccacccccctcagccagacgggcctcccttcccaggcccccatgtctacccgcgcccctcctctagtcctctctgccatcactccccctcctctccctccctcctctatgtcttcttctctcttcctcccccctctcgtcccttgtctcccctgatttttctcttccacctcacttgcattttgggggttcccctcatccccccatcccctatccctgtatttccctccatccctttctttctccctaacccactatttctcctcatctctttgttggtaccctcatctctctccccattaccacatttctccaagtttctgtctttctctccatccctttcttcctctccacttctcttgcctcctctcaccctcatttctttctcttcttgctttaaagctctccccacctcccccttctcaccttccccagtcacccccgccctgcttctccccacagccgcctctcctgtccccagaatccatctctgggttgggccccccagggacatgtctcagcaactggcagatggaacgaaactcacacacgtgcgtgctgtgggtgtgcctgtgtgtacgctggcccgaggcacggctgcctggaaccggagctgtgagtgaacatctgtccattcagcgcctaactgacgtgggtctgcgtgtgtgcaccagggtctggggtggagagctggggcgctgggatttgtatccccagggactcagggatgaacacagagagttgtcggtcagctgaccctggggagccagccggggtctgtcagtgctgtcacccatcagggaaactgagtcagaggaagggtgaaaagagatgcgggacctggggtgcccgaaccccagcccctcaggaccagatctgtgataaatgtctgtttacatgcccttctttccatgaattttttaaaaaaactatctgtatctaattctgttcttctctctgctcctcttactgtgaactattgatgtctcactttcggccttggtagctgcctcggtagctgcctcgttcttttctccctgcctgtgactccaacgacctttggtgtctggcacgggccagctccaggacaggctgaaagacatggagcagcagagagaaattcccccgtgcttctctctcctcgtctgtccctccccaaatctctgtcattttgtatctgtcaccccatctctgtttctcggtccctctatttgggtctctgcctctgtgtattcctgtctgtttctcctcctcatcccccctcacagccattctctctctgcttttacctgggagtgtctgtccctttgcatttctgaagtctccctgactttcttcttgtgtggctctctttctttctgagtgcctctccctgactttctcactgtgtgtccatgtgtgtgtgtctctttctctctgtctctttttccctctatctccctccctctctagctctgtctctatcctccttccgtctctctgcatccccatctctctctttttttttttttttttttgagacggagtctcactctctcacctaggctggagtgcagtggcgtgagctcggctcactgcaacctccgcctcccgggttcaagcgattctcctgccttagcctcccgagtagctggaactacaagcgcccaccaccacacctggctaattttttgtatttttagtagagatggggtttcactatgtaggccaggctggtctccaactcctgacctcaagtgatccatctgccttggccttccaaagtgttgggattacaggcgtgagccaccgcacctatctctttgtaaggctctatctctgtatgtgtttctctgtctctgtctctctcattcagtttctctccatttctctgtttctacatcttcgtctctccctgcagttccatctcttccagcctgtcccggagctctcccctgccagacaccaagtcctcacaccaagtcctcacaccctggggttttccccgaggaggctgcgccaggccaagcctctgcctgggcctgtcagggagaaggtgcattcccaaggagctcgaacgcccttcccacccaccagggcgggccgggctgtgtctgacgctgttgccgggagccgggctgcctggtgtctggctgtgtcaggatgatgggtcctcagatgatctgaggccagcccagagcagaaggggagggtgagtcctccgcccagtgggagggggcagcgcaggctcctccccagaagtggggcatttggctgcccagcccccaccccgccctgctcgggtggagcagctgtataaaaccagatgtttctaaaaccagagtgcggttgaggaaggataaccagggctttaatcctcaacagttccctcctctaagacccaggagtccaggttcccagcaccctcctccttcagacccgagagtccagaccccagcccttcctctctcaggcccaggagtccaggttcccatgtccctcctccctcagacccaggatcccagacacccagcccctcctccttcagacccaggagtacaggttcagagttcctcatccctcagacccagggtccagacccccagtccctcctccctgagacccaggagtccaggcccccagccccacctccctcagacccagaagtccaggtccccagcacccctccctcagacccaggagtccaggctgccagccccgcctccctcagacccaggagtccaggccccatcccctcctccctcagacccaggagtccaggccccatcccctcctccctcagacccaggagtccaggccccatcccctcctccctcagacccaggagtccagactccatctcctcctccctcagacccaggagtccaggcccccatcccctcctccctcagaccctggagcccaggcccaggcccccatcccctcctccctcagacccaggagtctcaactcccagcttccttctcccttagacctacatgtccagcccccagaatttcttgcaggaagagatgaccaaggctggaagcagcccagacaagtgctgaaagacagggagcagtgaagctgaacactcccacagcaggccggggctgttgttggagggacaggtagggacaccgcacccctcgctaacacccatggctcctagaaacccccattcctctggtggctgctctccagttcctgccctgggtccacagtggccttcccagcatttcagccatcatcaggaaacctcagggtacagcttacagaatacctggacagaaggagcacagggtgggagaggtaaggcaaaaatggagcaaaggcagaggagagaacattcattcattgtggggacatctcctgagccctggtggacagggctgggctgggcgatgccgggcacacagagatgactcagccctgggccctgcccttggggagatgccaatctggtggagaagacagctgtgtaaacagagggccacaaaacagtacaaggatgcaccaacccagcccaagagtcagggagggcttcctggaggaggtgatgctggctgatgaggcgttagccgtggtcagggtggtggtggacggtggggcaagaaaggggcatccaaggcaagaaatggtgtggccagtcaaaaaagtaagggcggattgatgctgtgaagcacaaagggtgaaacaaggggctgggggattgtagggtccctagtgaggtccgctcatttaggtttaaaaaaattttttttggccaggcacagtggcttatgcctgtaatcccagcactttgggaggccaaggcgggcagatcacttgaggtcaggagtttgagaccagcctgtccaaaatggtgaaaccccgtctatactaaaaatgcaaaagttagccgggtgtggtggcgtgcacctgtaatcccagctactcaggagactgaggtgggagagtcacttgaatgggaggcggaggttgcagtgaacgaagattgcgccactgcactccagcctcccgtctcaaaaaaaaattttttttaaactaagtaacaattatacatatttatggtatacaacatgacatttgctatatacatatatatatattcgttgtgaaatggctaaatcaagctatttaacacatgcaacgtgtcgggttttgaatgcaggaatcagaggctaggactttgctctggtggcaatggggagccatggaagggctgtgagcaagggaggggcaggatcagctctttgtctgagtaagggacaaactggagggagagacagggggctctgggccaggatgagttgctggggggtggggttgcatcagagatccctggggcttttccaggctagagaggaagtgtgagtgaggttgggcagaggtgcaggaccccgaggagccaggaccaagaagactgggggatggacacagacatggcgggctaacttgccaagcccctaacctcagctagttctggctacagttgctcctcgctttgctccatctcaggcaggtacctactggggaaccagtgagggcaaggggcccctgggcagtaacctgaagagatccttgttttattaaatgcttgaatcccggtagatggtttctttgccaggtgtcctggattgggaagggaaatgcacactgcggggatctagataccgagagacagaggagaaaaggagggagggagaggaatgaaagacagaagctggcttccacgaccatctattcaacagcgaaaaactgccctacccctggattcctgaccccctttactctcttctgctttttctttttccccatagcattggtccccttcctatataacgtataacctgcataaggtacgtttagtatcttttttgtgtaatgtgtgtcttcctggttcgaatgcaagctctagacaggcagctgtctttatctggtttgttcatggctcattcctcagagcctggacctgtgtctaggtaggtgctcaacaaatatgtgttgaacaatgtgtgaggtcaggatagaaagtcagattggtagatggagaggggaaagaaaaaggagagcgaccgggcacggtggctcacgcctgtaatcccagcactttgggaggccaaggcaggtggagcacttgaggtcaggagttcaagactagcctagctgacatggtgaaaccccgtctctactaaaaacacaaaaattaggtgggcgtggtggtgcatgcctgtagtcccagctactcaggaggctgaggcaggagaatcgcttgaacccgggaggtggagtttgcaatgagccgagatcacgccactgcactccagcctaggcgacaaagcgactctgtctgggggaaaaaaaaatggagaggaaggaaggaggggaaggaaagataagggaagaaggaggaaggagaggaggagggagggaaagagagaaggagggggaggaagatcagaagaggaggaggagaatggaggagggagagagagagggaaggataggcaagagggggaggagagaagttggggagagagggcctagcagctgggacccccaaccgactcctgcgtaatagttctatggacaccactcagagtggccagtcctgggaggatgggttgaggagctccggggaggtgggaccttagaggaaaaagactccaggatcagcaaagaccccaagtctgtaaagagactgcctctggacttccaggaactcagaaccttggatgggctggagttagacgggaccttttctcccccacatgcctattctgggaaacccctaggcttccatgattctgccgaaatccagggagggagggagggagcctagccagcaatgatgactgtacatccaccttctgcctccagctagtgcctctgggagaaactgtaggacttccagagctgggaggagggagagaaaggcctggagggggagagccctgcctgtaacaagttgaaggcactttctaccccagcatgcaccatctctcctgccactttccctggagagaaacagagacagtaagagccagacagagggagagggagggaggggcttccttttgcaaaagctgtttatcctctccagggaagcaagagaggaggagacccattttccagatagggaaactgaggcacaagaagagtcatttcctgggacaagtgatacagcacacaggcagcatggctgggtaacagaaatcaggtggtaggcattaggtcactaggctatgccctgccagtcacagaggaaggaggagctgggggcttagactaagatctgagagcctggattcctgagtctgagggaggagcggctgggatctgaattccctggtctgaggaaggaggggctggacctggactcccgggactaagggaggaggggctggacctgaactcctggatctgagggaggagggcctgggacctggacttctgggtctgagggaggaggggctgggggcctagactctggggtctgagggagaaggggctggacctggactcctgggtctgagggaggagggggtgggggggctggcatccagtgggctcaagatgaggcctggacccctagattctcagctctactgcgttccgagctatcagggaatctgccccgatattcatgtaggttcttttctattttccttaagcgttggccagcttgagaaataaagggacagagtacaaaagagggaaattttaaagctgggtgtccgggggagacatcacatgtcggtaggttccgtgatgccccacaagccacaaaaaccagcaagtttttattagggattttcaaaaggggagggagcgtgcgaataggtgtgggtcacagaggtcacgtactttacaaggtaatagaatatcacaaggcaagtggaggcagggcgagatcacaggaccgcaggaccgaggcaaaattaaaattgctaatgaagtttcaggcaccattgtcattgataacatcttatcaggagacagggttttgagatcaactggtctgatcaaaatttattaggagggaatttgctcttccaaataagcctgggagcgagcgctatgggagactggagtctatttcacccctgcagtctcgaccataagagacaggagcacctgggggggatatttataagcctatacctccaggcgcgtattctctttcccagggatgttccatgctgagaaaaagaattcagcgatatttctcccatttgcttttgaaagaagagaaatatggctctgttctgcctggctcaccagcggtcagagtttaagattatctctcttattccctgaacaactgctgttatcccgttcttttttcaaggtgcccacatttcatattgctcaaacacacatgatctacaatttgtgcagttaatgcaattattacagggtcctgaggcgatatacatcctcctcagttgacaggattaagagattaaagtaaagacaggcataggaaatcacaagggtattgattggggaagtgataagtgtccatgaaatctttacaatttatgtttagagattgcagtaaaggcaggcataagaaattacaaaagtattaatttggggaactaataaatgtctatgaaatcttcgcaatctacgttcttctgccatggcttcagccggtccctccatttggggtccctggcttcccgcaacaccgagccctgacagaaaacttcccaagcccaggttcctcttgcacatgtggtttagctctgtgggttaccccctcctctctgtaagttcccattgtccaccttgcctcctgcatcggcctccaccacagtcagggcagaggagtctctgtaggacaaacacagcaatcagattcagaaaatagatccaaaggtggggatccagggcccagggctggtggcctggacctctggggctgccagggaggagtaggtttgaaagaaaaccctgggccaggcgtggtggctcacgcctgtaatcccagcactttgagaagccgaagcaggcggatcatgtgaggtcaggagttggaggccagcctggccaacatgatgaaatcccgcctctaccaaaaatacaaaaattagctgggtgtggtgctgggcgcctgtaatcccagctactcgggaggctgaggcaggagaatcgcttgaacccgggaggtggaggttggagtgagccaagattgcaccactgcactccagcctgggggacagagtgaaactgtgtctcgaaaaacatgaataaatgcaagaagaccctgtttctccactccacacttctgacaccaaagaggccgggctgcattcccaccaacaatcaattctccaactctctggacagcaactgcatgtgtaacaactcacttcagttctgacactaactccctggagttagcacagcccccacaggttgagggctcagtcccacgggagtgcccccgacttcacatgccagtcacaggcactgggaccacagggtacccacacttctatctgacttggctacaaatcaggggtcccacaaccccttcctgacattccataatttgctatcacagctcacagaactcaggggggtgctttacttccatgtaccagttcattataaagagtattataaaggttacaggtgagtggccagatgagggggaacataaggtgaggtccagaagggttccaagtgtgagagcttctgtctgcgatggcgtcatgtggacgtcttcatcaacctggaacttctcggaaccctattgtttagggtttttgtggatgttcctttacctgggcattgttaacagaaaaaccaaactctataaagtattttattgtatttatttttatttatttattaatttttggagtcaagatctcactctggagtgcagtggcacaatcatggctcactgcagcctcaaccttctgggctcaggtgatcctcccacctcagtttcttgagtagttggggctataggcgtgtgccaccacacctagctacttttttaattttttgtagagatggggtctccctaggttacccaggctggtctcaaacttctgggctcaagtgatcctcctgcctcagcttcccaaagtgctgggatttttggcgtgagccaccacacctggactctgtaaaatattttaaagaagtttattctgggacaatttcagtgaccgtggtgtgcccaaggttggccagattaagtttggtttgatgttgcagccataaaaaagaatgagttcatgtcttttgcagggacatggatgaagctggaagctatcattttcagcaaagtaacacaggaacagaaaacgaaacaccgcatgttctcactcatgcgatcatgagttgaacaatgagaacacatggacacagggaggggaacatcacacaccggagcctgtcaagggagggggtgtgggagataagggagggagagtattaggacaaatacctaatgcatgcagggcttaaaacctagacgatggtgcagcaaaccaccatggcacacatatacctatgtaacaaacctgcacattctgcccatgtatcccagaacttaaagtaaaaattgatttgatgcattttagggaggaaggagttacaggcaaagtcataaatcagtacatggaagacatacattggtttggcctgaaaaggcagaatatcttgaagaggggcgggctgacaggttacagatggattcagggcttctttaatttgcagttggttaaaggagtaaggtctgcttaaaacctggagtctgcaaaacctggagtctgcaaaaaagaatgttttaagataaggatgagggatgtagcaagattgatggcccttagaagtgacttaacacttgccttaggtcttgtatgtaatttggtatcttatcatcacaaagagtctgttttgtcaatcttacgacgtctattttaactataatgctggtcttctgtgttcctaaactccaaaagagaaggggcataagaaggcgtgtcccacctcccttgaagtcatggccaggaactcagtttttaggtttctctgggatccctttggctaagaaagggtcttgctgagtcagtggtggtgatggtgagtggggtggagggagggccttaggattttatttttattttatagcatgattgattaaatcattggccactggtgattagtcaatctccagcccctctcccttcttggaatttagagcatgaggctaaaaattccactgggatcacagggttcgtctctctggcaaccatccccgatccgcccagatcctcctcattagcataaactcaggtatggctggtaggggctaattatgaataacaaaatatgttcttctcacctcctcactcaggaagttacaagaattttaggagctctgtgctagaaattaggggcagaaaacaaatatatatttatttatttttagacaagtcttcactctgtggcccaggctggaatgcagtggtgcagtcactgttcactgcagcctcaacctcccaggctcaagcgatcctcccgccttagcctcctgagtagctggaaataaaggctgtgccactgtgcccagctaattttattattttttgtagagacaggagctcactatattgcccaggctcactatatattgcctatattgtctcaaactcctagtctcaagcaattctcccacctcgacctcccaaagcactggaattacagttgtaaaccacctcacctggcccaaatacatatttctttctttttattttttattttttgagacagagtcttgctgtgtcatcccggctggagtgcagtggcgcaatctcggctcactgcaacctccacctcccaggttcaagcgattctcctgcctcagcctcccgagtagccgggattacaggcgtgtgtcaccacacccagctaatttttgtacttttagtagagacggggtttcaccgtgttggccaggctggtctcgaactcctggcctcaagtgatccgcctgccttagcctcccaaagtgctgggattaaaggcatgagctactgcgcccggccccagatatatgtttcttattgtcttagtcccttctggctgctctatcaaaataccctaagctgggtggcttataaacaacaaaaattttatttctcacagttctgaggctggcaagtccaggacctgggtactgacagatttggtgtccggtgagagtggattttctgattcataaatggggtcttcttgctgtgtcctcacatggtggtgggggcagggtcctctctctcgggcttcttttgcaaaagcaccaattgcatgcatgagggctccaccctcataacctcatcacctcctaaacatgctcccttctaataacatctccttagggattaggatttcaacaatgaagtttaggggacccgaacacttattccctcaccgttagttgcctgttcttggcgtggagccatttcattcctctgagcctctcttttttcatctgtaaaatgggactgtctcaatttgtccttcataggatagccctgaagattaagagagagagtctgtctggcacattagaatatgaggtgagtttagccgttcctgaaacagcagagtttgaaggtctccaagactaactcaggtggcaacagggggatgcttccctggataccccaccccttcaccctccctggataccccacctctcctctgaggagtaagccaggttggagctgggaggagcccacactctgtcatcagacacccctgggttccaaggcaggcaggcttgcgcaagccaactcctggctctgagcctccttagccacctgcagacaaggaggacccttccccatgttgatgcaggtgagtggaactctgtttggttcctagtctttcaagcatggggtgaatagaccctcttacccgggacatagcagaaagctccaaacagtttggtgaacagccagactgtgcagcacagagagtgtgtcatcaaaggggcacgcctgtgggctccagatagaggacacagagctgcagaagtccggcggcccctttctgtgacctgggctgcaggcacccacagtccagaggctcaaaaccacaatgccgtcattcccagtgaatgctgtaagatgaagaggaaataacgctgccgtggtttcccatgaggggattacttaagaggatgtcctaacccccagaagctctgactgcaaccttatttggaaagaggggttttgcaaatgtcataaaactaagaatttcaagatgagcatatcctagatttaaggtcggccccaaacgccacggcaggtgtccttataagagtgaggcagagggaggtagacactaaacacagagaagaaggtgatgtaaagacggcggcagagattgcagtgatgcacccacaagccaagtgtattagttttctaagggttctgtagtaacaaaatacatctgtccctcagtgtccttggttccacatgtagtggggttgacgggtggcccccaaaagatacatctaagtcctaacctgcagaacctatggatgtgaccttatttggataaagggttttaagagcttttgcaggtgtcatgaagttaaggattttgatatgagatctggcttttcaacactgataccatcctggccaacacccttctggtccttgtgataatttccattttccaaatgttgagagataacacagagatgaaggaagctgccccaaagcacatgagacacggcctccgccatcagctcttgtcatcgtatgttcaagtgttctgcaaaactggtccgtggagcccaaagcatccacatcatctgtgtgcatttgctaaacatgacgactactggtcttcactgtcatttattcagattttgtgagctcagggctatggaaatgatttaaacaaatgtcccaggtaattcttacgtacagtttgagaaccatctgattaggaaaaaaaaaatgcctcccaaagtgaaataagaagactgaatgcctgtaatcccagcactttgggaggccgaggtgggagccccagggggttcgagagcagcctggcaacacagtgagaacttgtcactacaaaaaatttaaaaattagctggatgtggtggcatacgcttatagttccagttacatgaggggctgaagtgggaggatcacttgagcccaggagatcgaggctgcagtgagctatgattgtaccactgcactccagcctgggtgacagagggagaccctgtatcaaaaagaaaaagaaagtgatgcagagacataggtggagattggagtgatgtatcacaagctaagtgtactagttttctaagacttctgtaataaaaaagtacagctgtccctcagtattctctgaaggttgcttccaagaccctgcggatactaaaatgcacagatgagttcaagacacttacataagattgtgtggtatttgcgcataacctatgcacatcctcccatatactttatttttatttatttatttattattatttgtttgagttggagtcttgctctgtcacccaggctggagtgcagtggtgcaatctcagctctgccccctgggttcaagcgattctcctgcctcagtctcctgagaggctgggattacaggcaccctccactatgcctggctattttttgtatttttagtagagacggggttttgccatgttggccaggctggtctcgaactcctgacctcaagtgatctgcctgcctcggcctcccaaagtgctcccatatactttaaaccatctctagcttactgatgatacctaatacaatataaatgatagacagttcttctactgtatttttaaaatttgtattttttattacttttttcaaatattttctattcgtgattggttgaatccttacatgtagaaaccacaaatatgaagggccggctgtgacacaaactcaggggattaaacaacagaaatttactgtctcaaagttttgccagctagaagtccagaatcaggatgttccagcagacttggtttcttctgagggctgtgaggcagaatctattctatgcctcttgcctagattctggtgattttttttttctttctttgagacaggctctttctctgctgcccaagatggagtacagtcagctcactgcccactaacctctgagccagtgagctgacccagccccaatcagctctttgcaacttctgcctctcaggctttagccaacctcccatctcagcctcccaaatagctgggactacaggcacaggccaccatgctcagctatttaaaaaaattttttttgtagagatgaggtctcattacattgccaggctagccttgaacttctgggctcaagcaatcctcccccatcagcctcccaagtagctgggactataggtgggagacacctcacctggttagcttgttttttatttttattaatttatttatttttgagaggaagtctccctctgtagcccaggctggagtacagtggcgcaatctcagctcactgcaacctccgcctcctggattcaagcagttctcctgcctcagcctcctgagtagctgagattacaggcacgcgcggccacacccggctaatttttgtatttttagtagagacgggatttctccatgttgaccaggctgttctcgaactcctgacctctgttgatctgcctgtctcagtgtcccaaagtgctaggattacaggcataagccgcagcgccctgcctatttttattttttagacagggtcttggtctgtcacctgggctggagtacagtggtgtgattgtagcttaccacaactcagaactcctgggctcaagtgatcctcccgcctcagcctcccaagtagctaggaccataggtgtgcaccaccacaccctgctcactttttaatgttttgtaaggacagggtcttgctatgttgcccaggttggcctcaaactcctgggctcaagcaatcctcctacttcagcgtcccaaagtgcggagattacaggcatgagccactgcacttggctgcttctggtgcctgacactgacaatctttggtgatttgctgacagtctgtggtgttccttggcttgtggaagcatcactgcaacctctgccttcctcatcacatggcgttcttcccgtgtgcgcacctgcatccgaatttcccttttttcataaggacaccagtcatgttggattatgggtccaccctagtccagtatgacctcaccttaacttaaacaattacatctgccatgatccagtatccaaataaggacacgttctgaggggctgggggttaggacttcaacataggaatggagggtggggagaggacaaaattacatccctaacaccaaggaatgctaaggatggcagccgccactgggagctaggagagaggcgtggaagggattttcctccagagcctccaaaaggagccaaccctgccgccactttaatttcagacttctggcctccagtactgtgagataatccatttctgtggtttgaagccacttggtttgtggtaatgagttacagcaccctagcaaactaacatgccagcccagtgcggggtacatgtggagcgtaagatgaacaagctcctctctgtgccctggggaggctcacagggaccatgcatgctcttctaaggtgcacgtgatcagagcagatcactgagggagcgtttccgctcccctaaccccaggtgcagggacttcagagtaattcctactaaatgacccctaccactgttgcttgacaaagggaggtgcgagggggaaaaaagactatgagaatgggagagggcgggtaatacaggaagtgtcacgtcactctggttgcagaggacagagaaaacaaccctgtctccagcaggtggaaatggtcataatgttgatggtggccatgatatgtatgtttttatcttattatattttgagacagggtcttgctcttactccccagaatagagttcattggcatgatcatgactcactgcagcctcgacctcccaggcccagcctcgattctcctgcctcagcctcctgagtagctgggactacaggtgtgcgccaccaatcctggctgattttttttattttgtatttttttatttttgtagagactcggctttgccatgttgcccaggctggtctggaactcctgggctcaagtgatccgcctgctttggcctcaaatgttggggttacaggtgtgagccactgtgcctggccagccgtgatacagatgctcagctctatgcttcccatctcatgttcatgagctccaaccaaaagattccctcaggcagctattactgctcgcatgttaaagaagagaaaattgacattcgaagagggaagtgacttgtctgaggtcacacaagcagtgacagccgggatctgaacatgactgttacaggatccaaaatacatgtgctttctacactgtgaggtgctggtagatgtttaacaactggctctccaaggggaaaaatgtatgtctgtgtataaacacatatgtttataatacattttgtaattttactgattataaaggatatgtaccacacactttacaaagaataataatataatctaaaattctctttattgtaaatgccatacaattataacttcagggtgacttgctatttcttgcaaaatccagtactagtttttattttattttttgtttttatttttttgagctgtagtctcgctctgtcacccaggctggaatgcaatggtgcaatcttggctcactgcaacctctgcctcccaagtttaagtgattctcctgcctcagcctcctgagtagctgggattacaggcatgcgtcaccacgcccagctaatttttgtatttttagtagagatggggtttcaccatgttggccgggctggtcttaaactcctgacctcaggtaacctacctgcctcagcctcccaaagtgctgggattacaagcatgagccaccatgcccagcctgtttgcagattttttaaatgtctggtttaataaaggacagatgaactctcttttcttctgtatccaaaccattgcaataattttgttttttgttttttgtttttgtttgtttgttttgaggcagggtctcactctgtcacccaggctgggcaacatcgtgagatcccatctctgcaaataaataaataaataaataaataaataaattagttgggcatggtggcatgcacctgtagtcctaactacctgggaggctgaggtgggagtttgaagctgcagtgagctatgatcataccactgcactccagcctaggtgacagagcaagaccttgtctcaaaaaaaaaaaaaaaaaagtgagaatacagctttgggctaaacttaataagattaacatttatttatttatttaattttattattattattatttttgagacaaagtctctgtgtcgcccaatctcagctcactgcaacctccacctccctggttcaagtgattctcctgcctcagcctcccaagtagctgggactacaggtgcctaccaccacacccggctactttttgtatttccagtagagacagagttttgccatgttcgccaggctattctcgaactcctgacctcaggttatctgctcacctcagcctcccaaagtgctggggttacaggtgtgagccaccacgccagacccaagattaacatttaaaaggtagacttagtaacacagcttaccctctctattgtgggcgggccacgtccaatcttttgaaggcctgaataaaacaaaaaggctggcccttctacgaataaaaggaactcctttcctgtcaacctttaagctgagacatgagtttttttcttgcttttggacataaaataaaaacattagctctttctgggtctcaagcctgccagcctttggactggaactacatcattgtctctccttctcagcccttcagactaggactgggactgcaccaccagcattcctgggtctccagctctcttcaacgaaatcattttagtgtactgcctttttcttgaggggaccattactgatacagaaaaagtaattgaggccaggcacagtggctcacgcctataatcccagcactttgggaggccaaggcaggcagatcaccagaggtcaggagttcgagaccagcctgatcaacatggagaaaccctgtctctattaaaaatacaaaaattagccgggcgtgttgatgcgcacctgtaatcccagctactcgggaggctgaggcaggagaatcatttgaacctgggaggtggaggttacagtgagccaagattatgccattgcactccagcctgggcaacaagagtgaaactctatctcaaaaaaaaaaaaaaaaaaaaaaaaagagagagaaaaagtaattgattttccccagatcacagagcttataagagatgaggtccagattccaatccagtcaacttgttaggagggtctgtattcttaacgtctaaattctacaagagggattttttccccatagaggcaccattcagggtgagctggatattgttaggatttgggagccgacaggggctatcatttattctcgttctttgaccacatcataggccattgcctcttctctgtttgctggttcatgcaagaccaggagctcccccagtaagtggccggaagggtaatacccaccccccgcaagccaagtctctccccattctcttgctcagcctcagtcacgggaaccaccctgtggttgattcattctgacaattattataggtagcttaggaacggatggttgagttgtgagttgcagaaactcggtcaagctggcttaagttaaacctgctggaagaacacaagggaatttaaaggaagccaactgcagacagtgcgtctagaccttagaggaactggaacattatctggtagcttctccctaccccttgcaatctggggcttcatcatctctcacttcttctctgttcaaatcctctgctcagttctctctctgtgactctttctagcaaatgatccagccggagggtgttctggagattctgcaaattggcagaagcgagggtggtcttgtatgaagggtctgccctctaactttgtagcagggtcctattttactacactctccttctgggcctcaatttctccatgtgtcagcataggaagaactctctgacttaatggagttggtgaccaaaggggttccaggatttacaagtatcctgcgtaattataaaagaggtacagaagcaaaaggtttagttaaaccatcattcattgaagccttttgtatgcagggaaaaggcaaggatgacacgatgccctccagaagctctggggtcagtggcataggttaaataaatgcattggatgctgatgagtaaggcttgcagagcttcgtggggggtgtacagaaaaaatcatcatgggagtctagagaagagctagattcccaaggaccacatcatgtcatcaaaactcaggaatctccccttgcactgagatgaaattagccctcatcacccagcccctcacccaaagacaggttctgctgtaagttaattctggatgctccaagcttctccttcatctctcttctttctattcattctctctccatttctcttctgtttcttgtttataataaaatgatggccaggcgcagtggctcactcctgtaatcccagcactctgggaggctgaggcgggcagatctcctgaggtaaggagttcgagaccagcctgaccaacatggagaaactccatctctactaaaaaatacaaagtgagccaggtgtgatgcatgcctgtaatcccagctactctggaggctgaggcaggagaatcgcttgaacccagtaagtggaggttgcagtgagccgagattgtgccattgcactctagcctgggcaacaagagtgaaactctgtctcaaaaataaataaataaataaaataaaatacaataaaatgatgatgtctgtaatggtaattaaatgattattcaagagccgacaacagaaatcttcttgatggggtgtggtggctcacacctgtaatcccagcactttggaaggctgaggcgggtggatcacaagatcaggagttcaaaaccagcctggccaatatggcaaaaccccacctctactaaaaatacaaaaaaatttagccgggcgcagtggcgggcgcctgtagtcccagctaacctggaggctgaggcaggagaatcgcttgaacccgggaggcagaggttgcagtgagctgagatcgcaccactgcactccagactgggcgacagagtaagactctgtctcaaaaaaaaaaaaaaaaaaaagagctggcaccagaaatcttcttaaggaggatactgttattgataaatgacttgagttaggaaaggagacctgagggataaagagtcagagtcaagggtaggatggctaaatttctctgcgttgtaaaaaaaaaaaaaaaaaaaaaaaaaaaagcaggaatctggaggtgaggagataagagggagggtggacttttaaaaggatgtcttaagttcaactggaagctttcatgtttgtccgttgctggccagttgcatactctaacatttccaagcttctttctgtaaagtgtgtttcatatttaaataccttgtgcaggtagcttttcagtaaattgaaggaaatgtctgagttcctctctgggttaatttcatcagggcagcaaccaccagacattgtgtgaactggactaactcagttgaagcaagacttagagccacaggtaaaaacacgggccctgggggccctcccttgtggagaggataatctgtttcccaaaatttattatataaaagattaggcatcaggtagatctcaaggaaatgaggggtcttcagctgacatctcgataactttatatttttactgagttgttgaccgataaaggctgaggactttatataaagtatcttctttttttttttttctgagccggagtctctctctgtcacccaggctggagtgtagtggcgttttcttggctcactacaacctccgccttccaggttcaagcgattctcctgcctcggtctcctgagtagctgggattacgggagcctgccactacgcccagctaatttttgtatttttagtagagacagggtttcaccatgttggccaggctgttctcgaattcctgacccctggtgatccgcctgcctcggcctcccaaagtgctgggattacaggcatgagccaccgctcctgccctatataaagtatcttcttgtatatcttgtctgatttaagccatactctttcacacttctccctcctccttcatttacctaggatgactatataatttatttttcacagcagggcacttttcagaatggaagtggacactactcatcatgatgccagaatgatgggtatcattcactactcataattcaggactaataataatgggtattatttgggttcatttcaggcaaactaggatgcagatgacagcttcttcctatcatttcccaccctgaccacccaaggctgaggtccaaaatcaaaaaagaagtcaataataaactcatatctgtttattctccccaaatcaggggacacaaaggcttttttttttttttctgatgagtgggtaatcctaaaataagcaggaaatgcctgtggctcagcctaactcaaggtgagacgaagctggagctgggagctcgaaagtgtcccccagctccctcctcactttgcctgtaactccacctctgcagaaggtaaagtagaattggtagctgtgtcactggtttgggttgagtcctcggtcagggccctctccagactggcgggaagggcgtggatcagcctctcccggaagtcctggcccatgaagacatagagcatggggttgaggcagctgttgaagaaggccagggcacttgtcacatccactgcaataccaatttctttgtacatgccttgcaataactcacggattctgactgtggctataagggccaccacctgatatggggaccagcagagaaaaaaggctgctgcgacaaaggagaggacccgtaagggacgactggacttaatcaagccttgcttgtggatcttggtggcaataagcccataactgacagcaacgatggacatgggtgcgctgaagccaatgatgaaccggatgatgcctctcaccgtcaacatggcaacggccacatttatcctctctttagggtcgttggtccagggcgaaaagttaaaagtgcaggctactgtccccgttttaccaggtactgtagtcacacgaatgataactggcaatgtgaggagcagagccatcacccagggcccaatgatcaccttcttggccaggctcacggtgcggtggttctgggtccagactggatgcaggacgcaaacacagcggtccagagcaatgagggcgatcaggaagacacttccgaacaagttgatgtccactatggtaaagacgaatttgcacaggaaccagccgaaaggccaatgtcctcccatggccttcctgaccatgaagaatggcaaagtggaggtgaaacagaagtcagccacggccaggttcaggtaactgatggtggtgactgtgtgtgtcatccggaatccagccacccagatcacaagcccgttgcccaggaccccgaggacaaaggtgactgcaaataccagataagtgatgatatccaggaagagatagccagcagatacagcaggtgtccctccagagatgttcgtggggagagaggaatttgtctccatcttgtctgctcctgaaatagtgcagtcgtggtcattcctcagttatgaacctccgtaccatttccccaccccctcatttctgcccctgccagttttcccactcctagctttctcaccttcccctagagctcccacaacagccggaacatcctcaccactgtcccttacacatgcccacatctatacattggcaatcttttattgtacctgttgggcaagattacatctttttttttttttttgagatggaatattgctctgtcacccaggctggagtgcagtggcgtgatctctcactgcaacctccacctcccgggttcaagcaattcccctgcctcagcgtcctgagtagctgagactacaggtatgcaccaccccactcctggctaattttcgtatatttagtagaggtggggttttgccatgttggccaggctggtcttgaactgctgaccccaggtgatccacccacctcagcctcccaaagtgctgggattacagacgtgagctaccacgtgtggccaagattgcatcttatgacacatcctcataattgctaacatgcaagcccctaccagggagattaaatggctaaggaagatagggtccttgacctccaagaggagaatatggggccaaagatgtatagagaaaacatgtattcaaacaaaaatgttcatagagacactcctccctatagccaaaaggtagaaacaacccagatgtccatcaacagatgaatggataaacaaaatgtggtttatccacccaatggaatattattctgccataaaaaacaatgaagcactgatatatgctacaacgtggctgaaccttgaaaacattactctaaacaaaagagggctggatgtggtggttcacgcctgtcatctcagagctttgggaagccgaggtaggagggttgcttgagctcaggagttcatgatcagcctgagccacatagcaagatcctcatctctaacaacaacaacaacaaaattaaattaaattagctggatgtggtggcacacacctgtagtcctagctactcagaagggtgagatgggaggctcacttgagcccaggaattcaaggttaatagtgtactatgattgagccactgcactccagcctgggcaacaaagcaagaccctgtctctaaaatgaaagaaaaaagaaaggaaggaaagaaggaggaaggaaggagagaaggaaggaagacaccacaagtcacattttgtatgattccacttgtatgaaatatccagagtagccaaactcacagagaccgaatgcagattagtgattgccagggactggggaaactaggaagtggggaattgttgcttaatgaatatgcagtttttgcttggtgtgattaaaaagttctggaactagataatggttatggttgcaacacactgtagatgtacttaatgccattgaattgtacatttaaatgggtaacttttttattgttgtttgagacgcagtctcgttctgtcacccaggctggagtgcagtggtgcgatcttggctcactgcaacctccgcctcccgcgtttaagtgattctcctgcctcagcctcctgagtagctggaattacaggcacttgccaccatgcccagctaatttttatatttttgtagagatggggtttcaccatgttggccagcctggtctcaaactccttgacctcaggtgatctgcccgcctcggcgtcccaaagtgctgagattataggcgtgagccactgtgcccagcctaaaatggttaactttttgtattttaccatcaatttaataaaggaaaaataagagcataagatatcagaaaatcagtgggcgacagcttcagtgacctagtgtcacacaaacgtggactaagactttctctcacccataacactgcataagaactataaggtatgcaacttctcagccaggcgcagtggctcacgcctgtaatcccagtaccttgggaggccgaggcgggtggatcatgaggttagcagttcgagaccagcctggccaacatggagaagccccatctctactaaaaatacaaaaattagccaggcatggcggtgggtgcttttagtcccagctactccagaggctgaggcaggagaatcacttgaacgtgggaggcggaggttgcagtgagcagagactgcgccattgcactccagcctgggcgacagagcgagactccgtttcaaaaaaaaaaaaaagatatgcaacttctccactccaaattctgctcgctctctctctttaaggtcatgaaatctccctttcctctctcatcgtgggaagcaaggcatagtacttggttagttttccaacataggtcaaatggatccgtgagtgatactaaacgacgtataatcaagtattatatccaatggattctgtgctagaagaagtcagaacaacagactctgtttccactctcgtctctgcggttaccttggccagatggatgggaggtgcttctccatccattggatgggctcagcactcttggggatgtagaagaccgtgatagaaataatagtccaaatatgtattggatatgacatttcattagatcaggtatgcaaagtgcatgtcaggttcttgctgagagctggccttctctcttttttttaatttattttattttatttatttatttattttgagatggagtctctctctatcacccaggctggagtgcagtggcgtgatctgagctcactgcaacctccgcctcccaggttcaagcaattctcctgtctcagcctcctgagtagctgggatttcaggtgcacgccgccgtgcctggctaatttttctttttaattgtattttagtagacatggggtttcaccatgttgcccaggctggtctcaaactcttgagctcaggcagtccacctgcctcagcctcccaaagtgctaggattacaggtgtgagccactgcgcccggcctggtcttctcttctaatgcttgcagcagccttcctcaaaattgttactatgagggtcactgtctttatggtacccattttgcagacgaggaaagtgcgacttagagcatttcagttaattccttaaagtcacccaacagcccaggctgtcgaattccagcaaaagtctctttctgcctctgccctgccacgctactggcacagaagagctgtctaatgcactagtcactcaccacatgtggttttcaagcacttgaattgtggctagtccaactggagacaggctgtaggagtaaaatacccatcagatttcaaagacttagtatgaaaaaaatattgtgaccatctcattaatagtttttatattgactacatgttaaaatgataataatttggctatttaagtttaggttagatattttattaaaattaagttcgcatgtttctcttcacctttttaaagtgcctacttgacactttgaaattacatatgtgtctcacatttctaatgaactttgatactctacaatctcagaaacaactcagagatgtctccctcccctaccacccatccaaccaccaaaataccctgaggactctttgtcctcaagaatctctaaggcaaccagttcagaagattgttgcaatgaatgatgaggattctgcaataatgagctggaacataccagagaggaaaacctgtgcaattttgtccaattatggttcaagggaaaaatcctgtgatttgcaatgaacacaggccttggtggctgccatcgatgaaggactttatgcttgataatcattgtaccacatcctcaactttcttgcctctgatctcaacaaactcagcattgattatacatcatcatccctgtgtgacggaagaggaaactaggagcttgatgagaaatgacagccaatgtctgcagattcatgagagggcagggctgtattccgctactgggtcctatgcaccatgcagaaccagtgtcttcacgtggagactcatcactgatccgaaaggtgactgcttctgtattacactcatttccccatgacccatcataaagtcgttagggctcttttgctttctcctgaaagcttcaaaccaaacatcctttcccatcccgactcaagccctcaagctgatgcccttgcctcttgctccaccagattctcctcctgctggctcctgcatcactgttctctgccctcatctctgtaaccagaaaacaagtgtttccatccaagaattaccctctactggtcccataaaactcattcccccatttactcaagaacttccctccttcacttatcccttctctctcctgcagcctcatagtgtctctatattccatcattcccatcaggaccccaataaagtctagagcctatttgtttatttatttatttacttatttatttgagatggagtctcactctgtcacctaggctggagtacagtggtgcaatctgagctcactgcaacctccacctcccagattcaagcaattctcctgcctcagcctcccaagtagcttgaattacagacgcccaccaccacgcctggctaatttttgtatttttaatagaagtgaggtttcaacatgttggccaggctggtctcgaactcctgacctcaagttatccacctgccttggcctcccaaagtgctgggattacaagcatgagtcaccgtgcccggcctgtttagaacctctttaaaaaaattattcttcaactccacatccttcttcaaacaaagagtctattgtgttcaccagtgtattaagtgtgtctatgtcaagctacccagtcccccagaatatgtttcttacctggactgttcaccagctgtggtcttgctctgggtagttctaggtctgggtctcctggggagagtgactcaggctctaatgattgcagcaaaacatacaccaaggaacaggaggaggggtaaaggaactaaaaccagctgggtagcaggaaataggaagtctgagcttcttctgatttttgatggccccaagaatacaccaatatactgtctgctttaatggcattaggacagtgggctgggcctgtttagaaactcatgtacctgactgtatttctcagcctcagtctctgtgggatgcagaggttcagtgctctcaacaacaagggccaagaaatccaagtgtccgggcccctgctccctccaagggtcaaggtaaagaaagcagcaagcactgtggtgagaagaatcagagggaggcaatgaaaggaagagaagaagtcatgagggatggagaccagaaacacagagagaggtaagggagtgggggaagttgagacagttggcaggacagcgcgtccacacccatgcacaccaccaagattaaccccataatcctctgatcttgtggaagctcatttgtagtcttctagcccaaagaaataaccgtttttctgaaatgttaagcatccttccaagggtatcagagtgatatggagaaatatggtaagacagttacagaatcagagataacgacactgattctaaaagcattattaccaaggcattgttgcattaagactgttttttcttttcttttagagacagtatcctgctacgttgcccaggcatgtctcagacccctgggtttagtgatcctcctgcctcagcctccccaaatgctgggattacaggcatgagccgggctgtttttaattctaagtaatttataatttacaattacacctaacaatggcttcaacaaggggtgtccaatcttttgccttccctgggccacactggaagaagaagaattgtcttgggccacacataaaatacactaacactaacgatacctgatgagctaaaaaaaaaaaaaaaaaaaaaaatcccccaaaaatctgataatgttttaagaaagtttatgaatttgtgttgggctgcattcaaagccatcttaggccatgggctggacaagcttagcttagaaccaagacgaaatttatggtttactttacaagaattttgcaagagggtaatactaggttaggttatatctggaaaatatcatcaagaactacattcattttaatcttttctcttttttatccctaatatggtgactttttttcctggggattgccacttcatggctccaagaaagctaccacagctcctgacttcacattacagcaggggtccccaacctccaggccatagaccaatacacagaccgataccggtctgtggcctgttaggaagtgggctgcacagcaggtgactggcaggtgagcaagagaagcttcatctgtatttatagccactccccattgctggcattactgcctgagctctgcctcctgtcagattagtggcggcattagattctcataacagtgtgaaccctactgtgaactgtgcatgccagggatctgggttgtgtgctccttatgagaatctaatgcctgatgatctgtcactgtctcccatcactcccagatgggactgtctagttgcgggaaagcaagctcagggctcccacggattctacatcattgtgagttgtataattatttcattgtgtattacaatgtaataataataatagaaataaagtctacaataaatgcaatgtgcttaaatcatcctgaaaccatctaccccgccaccccatggagaaattgttttttatgaaactggtccctggtgccaaaaatgttggggactgctacactccagcatcccacaccaggaggatggggatgagatggagaatcactgaagatctttaatcagaagggtgatatgttcatttgtactttataaacatttgtgtttgtattttataaacattttcttgggatcataacaacagatgcattttagaagattcccaaggtatgaagggtaacaaatgaagacgtgcctaggagtcacatggaagccaacactttgtaaggggattaaaataaagggaatggcagaggacatcattatgcacagaggagaagggcccaaatgtcaagagaaaacaagagacaagggactccacagagagtaattgccagaaaaatttgtaggtcttttgaagtctgactgttcttcctaaaacgggggtcctgggacacccctacctgtttcccatgagccctcttttctaaaacataagtaggttttcttcctggctaccaaatggcctgtgattagcacactaggttgggcaaaaatagagccaagtgtgtgttccaaagtgactatggtgaagaaaaaagcgaaagtcttaaaatggacttccacttctgtgtttgcgtaaggctaaaagggaagatgtcttagggttgaccggaatgggagtattcctgcctatgctgcaaaagtccctgactcttctggtaactgaaacatgagaaatggcctcggcgagcagcacagcctcccagtaaagcactggactgaggtggtaaagccagattgcctggactagaatcccaggactactgttcactagctccggacaagccagctaatccaggggtctcaaacatttcccccaactttttttttttgagacagagtctcactgtgtcacccaggctggagtacggtggtgtgatcttggctcactgcagttttgcctcctaggttcaagtgattcccctgcctcagcctctccagtagctgggattacaggtgcccgccaccacgcctggctaatttttgtattttttaagtagagatatggttttgccacgttgaccaggctggtcttgaactcctgacctcaaacaatcacttgccttggcctcccaaagtgctgggattacaggacggaaccactgcactgggccacaaacatttcctatgaagagccagatggtcaatatatttcatttggcaggccatagggtctccatcacaactccttggctctgctgttgtagcctgaaaacagccacaagcaaagttgtaaatgaggagcatgactgtatgtcaataaaactttatttaaaacacgacaattggacttcatataagttttgcatggcacaaaatacccttcatttgattttctttagccggtaagaaatattaaagccattcttggctctcaggccatacaaaaacaagcggtggctagatttgacccctgatttaactgcactgggtcccagacacttcacctgtgaattgagagcaatgatacttacagaggtgttttctggagcagaacaaataagatcagtgatacaaagcacttggcatgaattccagtgcaataagtattatcaatatcttagtaattacataaacctctctatctgctgtttcacgttctctgcggtgaacccatccatgcttaaaacttgaaccacacctcagctaacattcaccagacccctgtctctagctcagacctgcccttgatgttcagacacatcattttgggttcctgtttcctttcaaactcatctgcagcctttgctctcctcaccttctcccacaactctgttaaggactaaattgtgtcacattccccttcaaattcttaggttgaagccctcaccccatgatatggtttggctgtgtcccaaccctgatctcatcttgaattgtagctcccataattcccacgtgttgtgggaggaaccaggtgggagatagttgtttcatggggacgatttcccccataatgttctcatggtagtgaatatgtctcacgagatctgacgattttatgaggggtttcccctttcacttggttctcattctcttttgcctgctgccatgtaagatgtccctttgttcttccttcgccttccgcaatgattgcgaggcctccccagccacatggaactgtgagtccattaaacctcttccctttataaattacccagtcttgggtatgtcattattagcagcatgagaattgaccaatacaccccagcatgtcagaatgtgactgtatttggggatacaacctttaaagaggtaattagctgaaactgaggtcattagggtgggccccaactcaatatgactgatatccttatgaaaagaggagatccagacacagacaggcatagagggaaaactgtgtgaaaacatgaggaggaggcggtatctgcaagccaaggagagaggactcaggaggaatcaaccctgctgacaccttgatcttaaacttccagctgataaaactgtgagaaaatatatttctattgttgtagccacccagccaatggtattttgttatggcagctctaacaaactaaacactctgcttcttttcattgactctcgtctcaatgacagcccccaaatccacgcagttaccttggtgcaacagttctgaagaaaatggccacaatattcttggacactccttccactgacaggaaggcaggcatattgtatcgcctctcccctggaacctgggtagggttgggactactttgaccaaagaacgtggtagaaatgacttccacgtagctttcaaggctaggtcaaaaaaggctaggaagcatcttctggttctcctgggacacgtgttctggaggaaggcagccattgtcctgggactttgattcctctgagaccaccatgctggaaaggctgcctgtaggcacttggtgcaataccagcctagttcagcatttgagtcattccaacccaggcatctgacatgtgaatgaaggagctctagatgactccaattcacagtcttctagtcaccccccagacctttgagttttgggtggcagagacaagcatctctgtgccttatcctaattcccaacccacataatccatgaacgtaatgaaatggttgttttacatgctatgatttgggtggttatacagcaattatgaattatgaatgtgggcttcataaagacccttcatgcttcctcattctccagagccatttggtctccaagctcagtctaccaagcctggaaatctctccctaaactacacctcctctctagcacactactccagcacaggcaattattcgacaagttcaccttgatctctggcaacttcttaccctttaagatctctgcctccaactgggagcattctcagagccatccctttgcagggggactctagagcaatgttttctggaagcacacacctgacaagtcactctcctgcttaaatagcttttaagcagaagaaattgtaagaaagaaatttttttttagaccaatatccttgatgaacattgctgcaaaaatcctcaataaaatactgacaaaccaaatccagcagcacatcaaaaagcttatccaccacgaccaagtgggcttcatccctgggatgcaaggctggttcaatatacgcaaatcaataaatgtaatccagcatataaacagaaccaaagacaaaaaccacatgattatctcaatagatgcagaaaaggcctttgacaaaattcaacaacccttcatgctaaaaactctcaataaattgggtattgatgggacgtatctcaaaataataagagctatctatgacaaacccacagccaatatcatactgaatgggcaaaaactagaagcattccctttgaaaactggcacaagacagggatgtcctctctcaccactcctattcaacatagtgttagaagttctggccagggcaattaggcaggagaaggaaataaagggtattcaattaggaaaagaggaagtcaaattgtccctgtctgcagatgacatgatggtatatctagaaaaccccattgtctcagcccaaaatctccttaagctgataagcaacttcagcaaagtctcaggatacaaaatcaatgtacaaaaatcacaagcattcttatacaccaataacagacaaacagagagccaaatcatgagtgaactctcattcacaattgcttcaaagagaataaaatacttaggaatccaacttacaagggacgtgaaggacctcttcaaggagaactacaaaccactgctcaatgaaataaaagaggacacaaacaaatggaagaacattccatgctcatgggtaggaagaatcaatatcgtgaaaatggccatactgcccaaggtaatttacagattcactgccatccccatcaagctaccaatgactttcttcacagaattggaaaaaactactttaaagttcatatggaaccaaaaaagagcccgcattgccaagtcaatcctaagccaaaagaacaaagctggaggcatcacgctacctgacttcaaactatactacaaggctacagtaaccaaaacagcatggtactggtaccaaaacagagatatagatcaatggaacagaacagagccctcagaaataacgccgcatatctacaactatctgatctttgacaaacctgagaaaaacaagcaatggggaaaggattccctatttaataaatggtgctgggaaaactggctagccatatgtagaaagctgaaactggatcccttccttacaccttatacaaaaattaattcaagatggattaaagacttaaatgttagacctaaaaccataaaaaccctagaagaaaacctaggcattaccattcaggacataggcatgggcaaggacttcatgtctaaaacaccaaaagcaatggcaacaaaagccaaaattgacaaatgggatctaattaaactaaagagcttctgcacagcaaaagaaactaccatcagagtgaacaggcaacctacaaaatgggaaaaagttttcacaacctactcatctgacaaacggctaatatccagaatctacaatgaactcaaacaaatttacaagaaaaaaacaaaaaactctatcaaaaagtgggcaaaggatatgaacagacacttctcaaaagaagacatttatgcagccaaaagacacatgaaaaaatgctcatcatcactggccatcagagaaatgcaaatcaaaaccacaatgagataccatctcacaccagttagaatggcaatcattaaaaagtcaggaaaaaacaggtgctggaaaggggagaaataggaacacttttacactgttggtgggactgtaaactagttcaaccattgtggaagtcagtgtggtgattcctcagggatctagaactagaaataccatttgacccagccatcccattactgggtatatacccaaaggactataaatcatgctgctgtaaagacacatgcacacgtatgtttattgcagcactattcacaatagcaaagacttggaaccaacccaaatgtccaacaatgatagactggattaagaaaatgtggcacatatacaccatggaatactatgcagccataaaaaatgatgagttcatgtcctttgtagggacatggatgaaattggaaatcatcattctcagtaaactatcacaaggacaaaaaaccaaacaccgcatgttctcactcatagatgggaattgaacaatgaggaaacatggacacaggaaggggaacatcacactctggggactgttgtggggtggggggaggggggagggatagcattgggagatatacctaatgctaaatgacgagttaatgggtgcagcacaccagcatggcacatgtatacatatgtaactaacctgcacattgtgcacatgtaccctaaaacttaaagtataataataaaaatatatatatatataagaaagaaattttaagaagaaattctaagttctttttacagcattcaagaccaaccaagaaattgcctctgccgccctctacatacttaatgcttattgctgtctgccttatcatctatgctctggtaaacaaaagtaacctgcttttttgtgacccctttcgtgggtatttttactcccctctgacaagaatgcattattttttctcctttatctgagtctttaagactcagcctacatgttccctcctccggatattgactctagatccgtgaatctgagttagtggttccttttagaggacctcacaaggagccaggcatctgtctatcactacgtgcccccaccctattgtaactaagcactgcattctcacctctctattcaggtggtccgcagagcccatgtctgattgatctctatgtctccagcagccagcaaggaagcacctctttagagacctgcacctatacaatacctaccaccttttatttctcgatatgtgaactccattgagaacaaacgagtaaatgtaggtaatgtgccttcttcttttcttttcttttctttttttttttagatggagtctcgctctgttgcccaggctggagtttagtggcacaatctcggctcactgtaacctccgcctcccaggttcaagcgattctgccgcctcagcctaccaagtagttgggattacaggtgcccaccaccacgcccagctaattttttttgtatttttagtagaggtggggtttcatgatgttggctaggatggttttcaactcctgacctcaagtgatccacccacctcggcctcccaaagtgctaggattacaggtgtgagccacagcgcccagccagtaatgtgccttcttaagttctgtgagccattctaacaaattatcagaacagaggaaggggttataaacatccccccacccccgatttatagccagtcagtcagaagtacaggtggccacctgggacttggattggtgtctgaagtgaggacagttttgggagagtgagccctttaacttgtgggatctgacactaactccaggtagacagcgtcggagctgaattgaattgtgagatacccagtggtgtccccagagaactggagaattgcttgatatggaaaagacccacacatttgatgccagaagtactgcataagtcgagaattgagtttgacttaatcatcatatttgggcttgattgcgtggctgaaactcttcccacttcagtaattgtttctttcattttcatgaaactctgaagaaggaagggctggacattcagattccttgacccttgacatttggaagcatgaactccagtctctcacagaaggctagaggtgaaggaacattcagacacattggtttctaagaagagtccgctgacaacatacccaaggtgtcttctgaaaattataagaaatcctgagtttctgttaggggattggctccagctccattgtccctcccccatcattcagtagtctccgcgaaagcccttagagccggtgttgctccacaggaagccaagaagcacacaggaaaaggagcttagctgctggtaagttggggactgacaatttaaaatttatcaatggaactcctgctctctgacaaacacctcctaaattctagagcagtgctgtaatggagcatccacttgccacaggtggcttttgagtgcctatgtttctatcttgatctgaaatgtgcttaagtgtaaaatatacttagtgtagtttaatcattagtatgatcaaaataatacaatttatctcgttaataactttcattttggtaacgtgttccaatgattttttttatttgcggggttaaatgaaacatattattataattaatttctcccaatgattttacttttttaacatggctactagaaagttgtaagtcacgtgtgtggctggcatttagggcttgcattaccctgtctctactaaaaatgcaaacaacaaactagccaggcgtagtggtgggagcctgtaatcccagctactcaggaggctgaggcaggagaatcgcttgaacctaggaggccgaggttgcagtgagccgatatcgtgccattgcactccagcctgggcaagaagagtgaaactctaactcaaagataaataaacatgtgaaggagccaagtgtgaggagcttaagaggaagagcatggtaggcagaaggaacagagaaggcagaagccccgagatgacaatgagctgcatgttcaaggaatcagagcccgttatgggtggagcccagtgtgtcccacgagagtgcagagatgaggtctgaggaatgcacagggcaggtccaggggtacttgagggaacttaagataaggataagttagaagtttggaagccattagaaggtgttgaaaatagcatcaccattttattggaccttttttttttttttttttgagacagaatcttgctctgtcgcccaggctgaagtgcagtggcgcagtctcggctcactgcaaactctgcctctcagggtcaagcgattctcctgcctcagcctcccaagtagctgggattacaggcacccgccatcacgcccagctaatttttgtgtttttttagtagagacggggtttcatcatgttgggcaggttggtcttgaactcctgacctcaggtgatccacccacctcagcctcccaaagtgctgggattacaggcatgagccactcccggcccttattggactttttttttttttttgagacagagttttgctcttgttgcccaggctggagtgcaatggcacgatctcagctcactgcaacctccgcctccctggttcaagcgattctcctgcgtcagcctcccgagcatctggaattacaggcacgtgccaccacgcccagctaattttgtatttttagtagagatggggtttcttcatgttggccaggttggtctcgaactcctgacctctggtgacccacctgcctcggcctcccaaagtgctgggattacaggtgtgagccactgcacctggcccttattgaactttttaaaagctcatttggtttccttctggagattggattgtagggcaggggaaagtaggaccaggaacaacctatttgcaaagttggcgcaaacattcctgcctgacaggaccatggacacaggttgtagagatagagatggctctggctgtgcattcagcagattctgtagatagaattaataggacttggatgggattgtggtgagagaaagtgaaatgaaagataagttctagtttggaagttttaacaactgaatgtttaaactcaaatagacacaaaatattggaagagtggcaggtttgggaggatgagacaatcaactgtttggttgagccacgttaggtttgaaatgtctacgggactcccgtggggagaggttatatcagactggagcaccagagagaggccaaggctgatagtttagatgaaaagagagcatgatattttaagccctgagactggataatatcacctatagaaagactatatagagataagagaggtggggaacaagtaaaagctgcgggacactcctaaatttagagtcaaatttagagcagaaaatactagcaaaggggactgaaaagcggtggccaattgagcttcaaatgcaagtgaaagtgtgttgtgtgtacatttatcatctcatggcacaggaaaaacgtgatttaaggagaaggaagcgatccaatgggaagaagagatccaatggatcctctatcacgaagatattgagataagaaccaatatggatttgcacccactgcatttgcagccttgaggtcataagcatcctcaggaaaatgcaccaggtcagtgctaaggactggagtcaatacagactggattcaggagaaaaagtgaggcagggaatcaaagggagcaaacacagaaaactccttccaaaatctggctgcaaattcttttcatagaaagaattctctcaggagaaatagggttaacaccagaaaggaatatagtccaagatctttttggttgttttttgttttgttttttggggtggtttttattttgtttttgtttagttttgttgttgtttgtttgtttgtttttgagacggagtcactgttgcccaggctggagtgcagtggtgcgatctcagctcactgcaacctccgccttccggtgttcaagaggtcttcctgcctcagcttcccaagtagctgggattgcaagcgcgtgccatcacgtccagctaatttttgtatttttagtagagatgaggtttcaccatgttggccagtctggtctcaaactcctggcctcaagtgatccacttgcctcagcttccctaaatgttgggattacaggtgtgagccacggcacctggccaaggatggtttctttttaaagggaggggatatgatttatgtaatgtttatgtaatagtgagaatgatctagtagaaataaaatcttgagggtttgtttttggcagaaaatggaaggacaaatgcagggggaaagtttgtgggaagatgagagggcatcctgggccaatgcagggagggaaattattggaaagaacaagaagtctttattcacagtgacagaggcaggtagactgagggtcaggggaggaccggctgaaaatttcacatctagttattaccattttctcattataatgtcagtcaagggcatctgctgagagtgggaaaaacagagtaaatgaggtactttttggagaaagcaggactgaaataattaaggtgtgggatagcgagtgcgctggagaagtagagtaacctaatgaggaactgctgagttttcatttgaaatctgtggtcataaattcaattgcaaccctcgataattgtgaaagtcacttccgctctctgagccgtactttcctacctgttacacaaggacagcacttgtcccaaagcaagggtattgtaatcagagatgataaaatatatagtgactggcacatattaaggactcaccaaatagcagacctcataatcagtacaggtatcatctgtggttcgcagttctcctccttacattacaactagggtggacccaaaactttgcaatttttgccttgttaatttgtcctcacctgtcattgcacaatcatccttccttgttgcatcaacatttttttttttctgagacagagtctcgctctttcacccaggctggagtgctgtggcacgatcttggctcactgcaacctctgcctcccagactcaagtgattctcctgcctcagcctcccaagtaactgggattacaggcacccaccaccatgcccagctaatttttgtatttttagtagagacagggtttcaccatgttggccaggctggtttcaaattcctggcctcaagtgatccacctgtcttggcctcccaaagtgctaggattacaggcgtgagccactgcgcccagcctgtatcaacattttaaaatgaatttgaaattatggatagatcatgtcttctaagtgtcttgtagaatgtttggagtgtggatagagaaaatctgagtctgttgaggaactatggggtggaaaagggttaacagcacaattctgttgtaatcaatctggctgagctccaattctgtctctactctttctacctggtaacgttgaacaattaacgcagcccatctaagtcttaacttcctcatctgtacaatggttatactaattatcaggctgctgcaaaagtacttgtggtttttgatattattttcaatggcaaaaacagcgttacttttgcaccaacctaatatcactaagattaatcaatattcactgtgtctcaggagtgctcagtgttcacacatattaacacagcccatccacagatcctgtgagaggcgttgatagggttaaaggaaaagctcttggtgtgtgggtaatgttcataagtagaaacaactattgctatgagcatcgttcttgtcctgaccttgaacttcataatggattgagccccacgacacagcacacagcctggtgagggccaagagttcccatttgtcatagatatactcagtctagcctaaaagatttccacatctattctcacttaatcctcacctgaaagttagacttcaccataaaattgtcctcgttctgcagagcagaaaactgaggctcaaagagatatcactgactaaaaactcatagtgaggagacatcacagatgagattagaagagagatgtagctgacttcagagcccagtatatatatatattttagacagagtctcgctctgtcccccaggctggagtgcagtggcacggctcactgcaacctccgcctcccgggttcaagcgattctcctgcctcagcctcccgagtagctgggactgcaagtgcatgccaccaggcccggctaattttttgtattttcggtagagacggggcttcaccgtattgcccagggtggtctggaactcctgacctcaggcaatccaccccccttggcctcccaaagtgttgggattacaggcgtgagccaccgtatctggctgagcccagtattctttgtaacagtgactctcaattgggggtgactttgcctccgaggggacctttgacaatgtttatggaacctgttgattgtcatttctggagaaggagttgctactggtgtctgtggatagaggccaggggggctgctcaacatcctactgtgtccagaacagtctgccacaacgaagaattacccagacccagatgtcaaaggtgccaaggttgagaaaccctgagctacattaaataacgtcccatggaatacctcagtgaaactcactggtaatagcaggaagaaaaggaggaaataaggaaaaggaagaaggctaaaaatcaccagactgaggcatagccctatcctagtaatcttgggggaatccctttcaaaggcaggacttccgtatgcaaaggcagtggctctggagttgttcatctcggtttccgtatcttgctgcctccactgactggctgggcatgatgttgaaaaaaactacagaagtccccgggccatgaattcccccagatgtgatggctgtttcccaatgttattatgagcattagatgtgaacaagtgctatggaattgctatttctcttaaagatgctgaatagcccagtctgagatgattctcaaattctcatggccatagcaaatcatcctggcttttacacatacagattctagaatgagatttatggatataattgtttttcatttttattataagttcaggggtatatgtgcaggtttgttatacaggtaaacttgtatcctggtgttttcttgtacagattatttcatcactgagatattaagcctaatacccactacttatttttcctgatcctgtccctcccctcaccctccaccttccggtaggccccagtgttcccctctttgtgtccatgtgttctcatcatttacctcccatttgtaaatgagaacatgtggtatttggttttctgttcctgcattagtttgctaaggataatgaatacaattttaacaggcagcctggatgtttctgataaagtccacagaccacggcataagaaaatgtgctcaggtgacgtgggactttgtgttgaactggatacaaatattacagatgtgatccggaccagaggcagggactacatgttttgggtttttgttcttaaaagaaaaaaacaaaaacaaaaaaacttgatctgagaagctctgaagggtcatattcttacaatgttattgtccacaatttagtcacgtgtccactaccaaagcaatcccttgcaaagtaaaagggattctggttagtgctaattagactagtcaggatttactcccaacatggagaaaagacaccttctctgcagggtgagtaactaaacacaattgtggtttttcaagcagagaagaatggggaaccgttgctgggtgggcaaccagcaatatctgtcaagcgtaagggtttagaagtcagaccatgccaaactgaagtcctgaatctattatctactacctaagtgaccttcaacacatttcacaattgccctgagctttcatttattctaatgaaaactagaagtaatgaatattacatagctattacataggccaaaccggatcccatatgtagtaattaacacaatgcatagtctctaataagaacttcacaagtattaatacaacttattattcttatagtctttatcccacagacaccaaagctatacaaatcggcactgattatttgcattccaaacagagaagagctccacatcaagcagggacagggaaaagcagagggtagaaagcagagatggaactctctttgctgacttcctctagtgcagaatcctcaggatataacatactactacatgttaccagtgactcctcaaaattctcttcaacaataacctcaagccaaaccctcaaactttatcttgagtactagccaagcaataggtcaagggttctcacagtttgagggacaggagttgggagactggaagaacctggggctgaaagagattgcagagcttgccagcatgtttgcattgaatggtgggagacacagatgtgagccttctgattctgagtcatgtgccttcctcacaatgctgaggctgcctatgctcaattttccattgtccatacaacataagttcagtatgagccttgtaatcctcttggtgaagtgatcagcccgataagcgaaatgcatattgataatgatgggaatatggaggactatcccttcccaaaggagcatccaagagaatgccaattctatagcaccgttgtcaacaaggcttggtagatagagtgggtctcctggtaggagtgggagctttagtggaagttgatgtgagctataaatacagatgctgtaagatggttccacagctgagaaatggccattgttggaatgtttcaggtgctgctggcaagatggaaaccaacttctccactcctctgaatgaatatgaagaagtgtcctatgagtctgctggctacactgttctgcggatcctcccattggtggtgcttggggtcacctttgtcctcggggtcctgggcaatgggcttgtgatctgggtggctggattccggatgacacgcacagtcaccaccatctgttacctgaacctggccctggctgacttttctttcacggccacattaccattcctcattgtctccatggccatgggagaaaaatggccttttggctggttcctgtgtaagttaattcacatcgtggtggacatcaacctctttggaagtgtcttcttgattggtttcattgcactggaccgctgcatttgtgtcctgcatccagtctgggcccagaaccaccgcactgtgagtctggccatgaaggtgatcgtcggaccttggattcttgctctagtccttaccttgccagttttcctctttttgactacagtaactattccaaatggggacacatactgtactttcaactttgcatcctggggtggcacccctgaggagaggctgaaggtggccattaccatgctgacagccagagggattatccggtttgtcattggctttagcttgccgatgtccattgttgccatctgctatgggctcattgcagccaagatccacaaaaagggcatgattaaatccagccgtcccttacgggtcctcactgctgtggtggcttctttcttcatctgttggtttccctttcaactggttgcccttctgggcaccgtctggctcaaagagatgttgttctatggcaagtacaaaatcattgacatcctggttaacccaacgagctccctggccttcttcaacagctgcctcaaccccatgctttacgtctttgtgggccaagacttccgagagagactgatccactccctgcccaccagtctggagagggccctgtctgaggactcagccccaactaatgacacggctgccaattctgcttcacctcctgcagagactgagttacaggcaatgtgaggatggggtcagggatattttgagttctgttcatcctaccctaatgccagttccagcttcatctacccttgagtcatattgaggcattcaaggatgcacagctcaagtatttattcaggaaaaatgcttttgtgtccctgatttggggctaagaaatagacagtcaggctactaaaatattagtgttattttttgttttttgacttctgcctataccctggggtaagtggagttgggaaatacaagaagagaaagaccagtggggatttgtaagacttagatgagatagcgcataataaggggaagactttaaagtataaagtaaaatgtttgctgtaggttttttatagctattaaaaaaaatcagattatggaagttttcttctatttttagtttgctaagagttttctgtttctttttcttacatcatgagtggactttgcattttatcaaatgcattttctacatgtattaagatggtcatattattcttcttcttttatgtaaatcattataaataatgttcattaagttctgaatgttaaactactcttgaattcctggaataaaccacacttagtcctgatgtactttaaatatttatatctcacaggagttggttagaatttctgtgtttatgtttatatactgttatttcactttttctactatccttgctaagttttcatagaaaataaggaacaaagagaaacttgtaatggtctctgaaaaggaattgagaagtaattcctctgattctgttttctggtgttatatctttattaaatattcagaaaaattcaccagtgaagccaacttggtcttgtgttttctttctgggaagatttttaataacaagtttgttttctttaacagtgattagactcttctgttttttggttttttgttttttcctatctgtcagttttggtaaactgaatttcaaggagtttggccatttcattcaaactgtcaaactcatcggcataaaatagtataataactgtttaaaagttataaaacagcatgaaacttggctgggtgcggtggctcatgcctgtaatccaagcactttgggaggccaagaagggtggatcacctgaggtcaggagtttgagaccagcctggccaacatggtaaaaccccatctctacttaaaatacaaaaattagctgggcatggtggtgcacacctgtaatcccagctacttaggaggctgaggcaggagaattgcttgaacccgggaggtggaggttgcagtgagccaagactgtgccattgcactccagcctaggggacaagagtgagactttgtctgaaaaaaaaaaagtatgaaacttgaaatgctttcttttatgtatttattaatttctgatttttgttcttcttgttgttattatcctagagcacagcctttggagatacagtttcttttaaacaacgaaaatgtaagctctctgaagtcagggattttggtctgtatggtttgctgattgaaccccatcctctatgtgtaaaatactgtctgatatgtaatagacattcattaaatactcattgaataaatgaatcaataaacaatagtatcacctaggtgtcaagtgagaagttttaatgtcaaatcaaaattatctccaacccttattacatgaaccagaccatgtccagtaaacacccatcctcaagcacacaatatttagaaatactcatgtggcttactttttcatcaatttctggttttgagcttctgctttaaggaaagtaccatggctaactgttgcctcacgcctttgttttgaaataaatcaacccacaaaggtactcagccctttactttgcttacaggaaatgaccactcagaaatggtccttcggtgcggaacatactttccggatgcactggcaaaagacagaactctacacgaatatgaggcagtcctgttatcagcgtcctcactcactccaccgcttctccctttccctcctgtttcccctaaagttatttacatttccaacatttccaaaacagagaagtttacttagttcatttgcattcttgactcctataaatgctttccagttcctaagaaaagtataccctttaatgcccgactaagttgtggccatagaaaataaggaacaaagagaaaacgcaagaaggagaaacctggagccaagaacagcatatgaccttgaaacaggagaaccacggcttctagactggctagttaacagccttcctccactgccaggacagaggagtcttactttccttcccactggccttggttaattgcactggaacagtgcctgctgcatcctccccatttttcttttcttcattggaagttgccattgtggattctcagttccaattgcacccttgtgtactggggtcttcagaagctgaggattcttggtgtttatgggacattcaccaccaataaacatttctagacttgctcgaatctggaagtccaaaataaaactctggggatagtgtccatgggaagaacaggaccactttttctgtttggggagaagagtgtagagactgttgagtacccaaaggcgtaagctcccctggagactgccagctgcctacccaatattcttccccctactttattaacaaatgtgggcagcaattcattcagctaaaataatccttttctcagtcatccttccagctaggtgtgggtaaattctaggcagtaagatacaaaaatagtatcacattagtacataaggggctgcctcattattttattaacatagtgtttattgattgattgattgattgattgagacaggttttcactctgtcacccaggctggagtgcagtggcactaatcacggctcattgcagccttgacttcccaggcttaggtggttctcccacctcagcctcttgagtagctgagactgcaggcttgtgccatcatgcccagctaatttttgtattttttgtaaagacagggtttcaccaagttgcccaggctggtcttgaactcctgagctcaagcaatgctcctgccttaccctcctaaagtgctgggattataggcatgagccactgtacgtggcctagagtttattttttagggcaattttagattcatagcaaattgggaagaaaatacagagatttcccataaacccactgcccctacacatgcacaacccctctcattatcaacatccccgaccacagtaatatatttcttacagttgatagacctacgcagatacatcattaatccaaagcccacagtttacattagggttcattcttggtgttttactttcagcgggtgatatggttaggctttgtgtccccacccagatctcaccttgaattgtaatccccataatccccacgtgtcaagggagacaccaggtggcggtaattgaatcacgggggcagttccatgatggtcttgtggtagtgagtgagttctcatgagatcttgatggtttcataagcggctcttcccccttcactgggcacttctccttcctgctgtcttgtgaagaaggtggcttgtttccccttccccttctgccatgattgtaaaagtttcccgtggcttccccagccatgctgaactctgagtcaattaaacctctttcctttataaattacccagtctcaggcagttctttacagcagtatgaaaacagactgtccaggtacggtggctcatgcctgtaatcccagcactttggggggccgagatgggcggatcacaaagtcaggagatcgagaccatcctggctaacacggtgaaaccccgtctctactaaaaatacaaaaaatgagccgggcgtggtggcgggcacctgtagtcccagctactcgggaggctgaggcaggaaaatggcgcgaacccgggaggcggagcttgcagtgagccgagatcgcgccactgcactccagcctgggcgacagtgggagactccatctcaaaaaaaaaagaaaaaagaaaacagactaatacagtgggtttggacaaaagtataatgacttgtattcaccattacagtatcatacagactcgtttcattgccctaaaaattttctatgccctgcctattcacccctacctcctccctatcccctggaaaccactgatattttcattgtctttatagttttttcctgttccaggatgtcatatagtagaaatcatgaagtatgtagccttttacgattggcatctgtcatttagtaggatgcatttaaagtttcctccatgtcttttcatagactgatagctcattactttttagcattgaataatgtccactgtctggatgtaccatcatttatttatccattcacctactgaaaaacatcttggttgcttcccaattggacaattataaataaagctgctataaacatccatgtgcaggtttttgtgtggacagaagtttataacttgtttggataaataccaaagaacatgattgctggattgtatggtaagcatatgtttagttgcatgggaaactgccaaactctcttccaaggtggctgtatcattttgcattcccaccaataatgaatgaggatgttccatgtctttgccagcatttggttgtgtcagtgttctggattttggccatttctaataggtgtagggtggtatctcactgttttaacttgcatttccctgatgatatatgatgtgtatcaccctctcatatgttaacctggcatctgtatatcttctttcttgaggtgcctgttaagggcttggcccatttttaaaatgggctttctgtgtccttattgttgagttttaggagttctttgaatattttggataacagtcctttatctgatatgtctcctgcaacactctcccatagagcagattttttttttttttagatttttttttttttgagacagagtctcactctgtcacccacactggagtgcagtggcaccatcacagctcacagcagcctcaacctcacggactcaagtgatccccccacttcatcctcccaagtagctaggactgcaggtatgcaccactatgcccagctaatcatttattttctgtagaaatgggggtctcactttgttgcctaggctggtctcaaattcctgggctcaagtgatcctcccacctcagcctcccaaagtgctgggattacaggtgtgagccaccatgcccagccagaaattttcaattttaataagaattgccttcttgattctttctttcacggattatatcttttgttttgtaattacaaagtcattgtcaaaccaaacgtcatctagattttctcctatgttatcttctaggtgttttatagttttgtcttttacatttaggtctgcgatccattttaagttaattttagcaaagcatgtaaggtctgtttctaaagttacttttttgcacatggatgtctagtcattccagaaccatttgttgaaaagactatcttttctccattgaattgcctttgctcctttgataaagatcacttgacaatattaatgtgagtctatttctgggctctcttattcagttccattgatctatttgtctgttcttttgcctgtagtacactgtcttggttactgtagctttacagtatgtcttgaaatcagatggtgtcagtcctccaactttgctcttcttgttcaatattatgttggctatactgggtcttttccctgtccatgtaaactttagaatcagtttgttatatccacagaataaattgctggaatttttattgggattgtactgaatccaaagatcaaattgaggaaaactgacatcttgacaatcttgaatcttcctagccctgtacatggactatctctcaatttcttcagttcttctataatttctttcatcagagtgttgtagtttttctcatatagatcttgtacatattttgttagatttttactcagtgtttcatttctgagggacataatgtaaatagtattgtgtttttaatttcaaattccatttgctcactgttggtatctaggaaagtgattgatttttttgtactctgcaaccctgctataatcacttattacttccaggaatgtttgttatccaatcttttggattttctgcatagatgatcatgtcagttgtgaacaaaatagtttttttttcttcctttccaatatgcatacctttttagtttgtttttaattgaattagctaagacttcagcaatgctgaaaaccaatatgagagaagacgtccttgccttgttcctggccttactgggaaagcgtcaagtttcccactgttaagtataatgttagctgtaggattttttgtaggcattgtttatcagattgaggaagttcctctttattcccaggttactgagcatttttaaaaattatgaatgagtgttgaattttgtcaaatactttttctgcttctactgatataactatgtggttttttcattagtctgttgatgtaattgattacattaattaatttttgaaatttgaactagacttgcatacctggcatgaataatttttatactttgttttatacattacattatagtagtttagacatttttgggtttgatttcctaatatgtttttgagaatttttgcatctatgttcatgagagttattggtctgtagttttgttttcttgtaatgtctttaaatggatttggttattagggtgatcgtggatttatcatgagttagaaagtcctccttctgtgtctgtattctcaaagttcctcattctttttaatttttgcattgtattttattggatgaatgtaacaaaatttaatctgaccaaattgcttttgatcttttgctcattacaaaaaaaaagctacaatgaatacctgtgcacacacacattcctttgcatgactgtgtgtttgtctatagaaaaaaattacaatagtttgtaacctaagtgtctatcaacagatgaatgaacaaaaaaaaattgttcatatacataatggagtactattctgccatgaaaaataatgagactctgtcatttgcaacaacatggatggaactggaggtcattatgttaagtgaaatggatcaggcacagaaagacaaactttgtatgttctcacttatttgtgggagctaaaaatcaaaacaattgaactcatggagatagagaatagaaggatggttaccagaaattgggaagggtggcaggagtcgggggagaagtggggatggttaatgcgtacaaaaagaacagaaagaatgaatgaaacctagtattcaaaggcacaatagagtgaatatagtcaatgataagttaattatatattttttaaaaactaaaagagtataactggattctttataatccaaaggacgaatatttgagggaatggatactctattttctatgatgtgattattacacattgcatgcctgatatcaaagtatctcatgtaccccataaatatatacaactactatgtactatgtaccgacaaaaattaaaaattaaaaaaagtaatactaaaaaagatcgtttgtaatttagttgatttctctgctcttatctactatcagagctataaagcccattgccacatcttaggaagacaacttttctgaaaaacaaatagtgatctatttcttgacatgagtgggagtacatgagcattttgttttacacaaatatattaatcttcacgtttatctttttctcattgtgtgtgtttgtgtgtggggtggttgttatagtccacattttaaaagctaagagaaataagtcagctggatgtagcggctcatgcctgtaaccccaccactttgggaggccgaggtgggcgaattgcttgggcccaggagttcgagaccagcctgggaaacatagtgagacctcgtctctactgaaaatacaaaaattacctgggcttggtggtgcgtgcctgtagatccagctgaaggactggggctgaggtgggaggatagcttgagcccgggaggcgaaggcggcagtgagctatgattgtggcactgcactccagcctgggtgacacagcgagaccttgtttcaaataaaagaggaaaaaacgaaaaataagtcaatcgaattcgggtccccttttctttataccagtaaagcttcatagctcctgaaattaggctgcttgaagcaggacacctttcatataggtgctgcaattctctaaattcatacttgctaggacagggagggtcaaaggcagcaggaggaagccatccccggcatgactggctcgggtctcctgggctcgtgaaaacgaactcattagacatcgagctccctcttgtggcagctaaaagaaaacacaaggaaatgcaactcttgcttcactcagttctgtgaccgcattgggagataacccttggaaagcttgattatttgtgggctagctcgcccagaatacatttctaagcacatctgtacaagtaactttgttctttcaatgcagaaagtccccttcattccaaaatgtacattccagagacggtggaggctagagatctctcctgtatctcatcccattctatgagttaccagtgccattagacgaaagaaagtccatgtaaatgcttaggatgctggcgactgttcaactgtgattccattctatctttccatctcatgcctcctgcggctccaaacaccatctagttaactgcgtcccgaatgttgacctacactgatgctgtttcatcagagtcaattggggaggtgtttgtttgtttgtttgtttgttttaatatgggttaggtcactgcaacatcaaagcatcttgatttataaagtttggagcagagcacaataatctgtgtttaatcacagattaactttgttccctttaggtattccctggtaaattgtaatgtgcaatcagattcccctgttttctttttttgttttgttttgtttttgagtcagggtcttgctctatggtcaaggctggagtgcagtggtgcaatcatagctcactgaagcctcaacctcaccagctcaagcgatcatcccacctctgtctcccgagtaggtgggaccacaggaacatgccaccacacggggcttatttctgtgtgagccactgcgcccagcaatgattcccctgctttctagcagttgaataaatactcttttaactagaggacataataagaactaatattagaccatgagaattagaactaatattacctcttggaaacacggatatatctttatggtccacaccatagaacaaatggtcttttttatatgcggtggtaacacagccattgggagggaaacatggggagaagtcctagttaggaaagcaaatttggagagtgaggctgtgatcgtgaaatcacaggtgtggacaagctaagctgtcaatactttgttcttctgaaagaagaggttctcagcaacagtgaacagaattaataatttatcagaaaaaagtcccccatgccctttacacctcaattcttaccacaaatagcaaaccaactaaatctggatctgatttttgtatgtacacacaaagcacataacagttactgagaaacacagtgaaagaggaaggacaacctctgatacaaaaagagccaatatcgcctccaaaaactatgtcccttactctccctccctcaggtcctaacactaacttcctgtcccaatttgtagggaagtaggtgctcaatggttcctcttgcccagtgtgttctcttccagttgaaatggcaatctaggcataaagtttggaagatagagtcaaagaattaactactaatgatggagattttgtgagacccacacagagttgggaggcttgctggttgataaaactcctggcaattcataatgtttcacctattctaagtcacacttgagctaatattataccaggttgtccctgtgttagttatctattgctgcaggcaaatcaccctcaaaacatggcttaaaacaatagtaatctaatttactatctgttacaatttctctgggtcaggaatttggaagtttctggcttgagtgtttctggattgaaatctctcatgagtttgtagtcagatgtgagctgaggctgcaattatctgaaggcttgactgaggctagaaaattcacttccaggtgacataatcccatagataatgagttgttgctggaaagttgcttcctcaccacagaactgctggagtagtctcataacgtggctgatggtatctcccaggatgagtgatctgagggggaaagcgttaaatggaagtttcattctttttatgaactacacttggaagggatatagcattacttctgccatactccattggtcagggcagtcacaagtcctggtccagattgaagaggagggggaaaaaatcctcacttctctgtggaaggagtgggaggagtgtgaattacctgtacagacaacatgtgggatgagataaatatgtaacatagatatcagtggaaaatatagtctgccactgtctctagagatcattctagatagtcaaatcacggtaaacattttaccagtcacgatgggtatctagactatgggaataggaatgtaatttcaagcccagttttaagaaagggcaagattttaaaaatttatataggttatgctgttgtacatcaagtacaatttcttcccagttggcacctcctatcccgttcttgttacagtcaaaaaaccataagaggaagtagatacattcagagaaatctagtttctatccttgatcattctaacatgtttcctgcttctacagtttcagtggcaggaacagaagctgttcctgggatcagcaacatggactttgacttgccaaggccaatctggctacactcactgctgagtgcccaatctgcccacagcagagatggacactgagtccctgatatggcaccattccctgggtaatcacccagctccccagtggcaggttgaacacactggaccacttcccttgtgggagaagcagagcctcgtttttatcgggatagatgttaactctgaacatgaatgtgctttctctgtacataatgcttctgccaaaactatcatctgtggacttacagaatgccttgtccatcatcatggcattccatacagcattggtttgattgtgggattaaattcacagcaaataaactgtggcaatgggtccacactctggaattcactggtcctaccatattgtccattttgagtagccggcttgaaggaatggtaggatgaccttttgaagacttacccaagtaccagctagcaggcaataccttgcagggctggagcaatatcctttaggaagctatacatactctaaatcagcactcagtgtatggtgctctctctcccataactagaatccaaggatccaggaatgaaggggtagaaatgggaattgtatcactcattattacctttagtgatccactagaaaaatttctgcttcccatcctcatgaccttatgctgtgttggctcagaggtcttggttccaaaggaagaaatgtatccacccagcgacacaacaatgtttctactgaactggaaggtaccactgcccatcactactttgggctcctcttgctctgaatcagcaggcaaagaagggagttactgtatggatggggtgactgatcctggctactaagaaggaaattggtatgctactatattatatagagataatgaagaacatgtctggaatatgacagacccattagggcagctctgagtaccaccttgttttgttattaaagtccatgtaaaaccacagctctatcaagcaggactgtaatgccccagatctttcaggaatgaaggtttgggtttccccactaggcacagatgatgaccaactgaggtactagttgagggaaaatggaaaatggattgaggagtgaaagatggtagttataaatactaccatgatcgcagaatcagttacagaagtgaagactatcattttaatgaatatttcttattttgtcatgaacaaatttgtgtgtttcaaaaatttttgttttctttcctcttttgtctcattatcacataacataaaatgtattaataataggtaattttaaatcatggtgtttatattagaggagatcaaaaagaagagagaaggctgggtgtggtggctcacgcctataatcccagcactttgggaggccaaggcgggtaggtcacttgaggtcagtagtttgagaacagcctggccaatgtgataaaaccccgtctccactaaaaacataaaaagtagcctggtgtggtgctgtgcacctataatcccagctacttgggatgctgaggcaggagaatcccttgaactcaggatgcggaggttgcagtgaggtgacattgcaccactgcactgcagcctggacaaagaaaaagaagaagaggaagaggaagaggaggaggaggagaagtataggaggaggaggaggggaaggggaagaggaagacgaaggagaaggaggagaagaagaaacatcacccaaggactctgcatcctcttctggagaaagagtcagtgcatttttggctataaggaagataggtgtatcatgttaggaggaaggaggactttgttcttacctttctttggaaaataaacatgatttaaggaaacgtgtatgggtgactggatgacaagaatggactgtgagggttagctttgtgtgtcaatgcggctaggctatagtgtcctcctcatcaaaaattattatagatgttgcagtgaatttcttttcagatatgatgaacatttactaccaactgactttaagtaaagcagactaaactttataatatgaatgagcctgaaacaaaaaattgagaaattttaagagcagaaccaaggtttccatgaagaagaagaaactctctgtggactgaagcatcaactacagcctgggagtttccagccttcccttcctgatggtctgccctatggatttcagacttactgagccagcttccaaagtctcataaaccaataaatctcatatatatatataagttctatttacctggtagaaccctgactgatatatgttttcagtgctttccccccagagaggtgggaaaaaaggtctactgctctgtaaaaaaccgaacataattattattgctttaaaattcctcatttgattctttatcatctgacatcccaggtacttacactaattatttttatttatctatggaaactctgtaattatgaactgtgttttgaaacgccaataatatctacttaatttctcattgaaataaggctttatattttgctctatttaaaaactgtcatattacttttatcgcttctgtactttctattaaaaatcacatattctgagaaaaaacagaggaatgataaaacattaactaatataaatgagtaggtattgagaggaagagatggaggtggtctctctttttctctctctctctctactgtatcattaaattttttgttattgccatcagcatatatatatgtatatatatgtgtatatatgtatatatatgtgtatatatgtatatatgtgtatatatgtgtgtatatatgcatatatgtgtatatatatgtatatatatgtatataaaatatgttctctaatctaactgaaaaaaaaaaactctgtagcacaaacctccttctgaacgttacaaccaatctctgttctccttgacagcaaatacaagggccactaccacttcagttctctacttcctcatttcacattttcacaacaacccattctatatgggttcctttcctgattactgcaccaggactactcttattatggataacagtgacatctgttgccatgttaccgcactgcaggttcagacatttggtgcttggctaagaatccaatggggggaaatctaccatctctcaggtaacagtggaatcttatgcccctaagcatatatgactcagttgaccagtcctttcatctttgaatagataatgttcctggtgacatcactcgtgtttggtttccctcccacctcagtgacttctctttctcaatttccttgattggcccttttctgacttttaaatattggtgtacccaagggcccaattctagaccccctcacctatttgtgtcaatgtagtcatcctaggtaatttgtccctataacttgaaatcccacctgtccattgatgacccctcccaaatctccatcataatccacaacctcttctcagaagaagtcctgactggtatctacctccctcctctgcatttccacttgaaaatctaactgaagtattttatgtggcatgaccaaaacagaactatcaatctgattcttcccaagaaactgattgccatgttttccacatcatttccaattttagaaaaagtcaccaccctctacctaatatcttaagtaccaaatatgagttattcctgattcttttactgtcatccatcaccaaatcacattgactctatgtcagaaacatcgatcaaatctgtgtgtttcttttctatgcactgctatcacgtgactccaatccacctccatctggatgactgtaatagtctcctaattcttctttctgcttccactcttgctttgtagcaatccatctttacaaacctttttcatagtgtaagcatcatcatgctcctcccctgattaacaccctataatagctgtctattgcactaataaaacaaacatttaaagcctttctctaggaaagcctcatattatctggttcttgcgtattctctcacgtcatgtttcttctcacttattatgatgtaactacactagtagtatttttatttctcaaacacaccaagcttactcttgtctcacagtctttgtactaaccactcctctgcctggaatatttcttctcttgaacttctgaaaccacctttgcaaaactatgaccgagacagtgaaagagctctaatttaatcaactccatcttgcttctaacctccgagctgtccttgttcatttctgggtgtaggctgaactgactttgggaaaaacttagtttgtagtttaaaacaaagatgataacagccctttcccaaagcagacctccttcttccctggggactagattgccttgtagaactaacattagccacaagattagaaattatggtttaggagtcatgcagctggaggctacaagattctgaccctccctaaactgctcctaagatcagtgtttgagatattttgcagactctacacttgatggatcagctggcaccacccagatggataaactggctcatctgatcttgtggcctccacccaggaactgactcactgcaagaagacagtttcaattccctgtgatttcatctctgacccaaccaatcaacactcttggctccccggcttccccccacccaccaagttcttcttcaaaactctgctctctgaatggttggggaggctgatttgagtaataatgaaactccagtctcctgcatagctggctctgcgtgacttactctttctctgttgcaatttccccgccttgataaattgactctgtctaggcagccggcaaggtgaacccattgggtggttacacttcacattagcagttcatgtaattctgatttcagctcacatgtcacctcctcaagatattgttttctgagcctctaagataaagtagcctctcagtcactctccattctagtccatgaaactgtacttattctcttgataaccttcattgctgccttctgtcaatcacaaaattacccttttccctcaatctttacaatcactgatctgagtgcctttgcatttctcactctctgtctcttcatctattgaaacagcctctgcattcacctgctattctgtgaaaggggagtagatttccaccgaatgatgtctgcgccagttctggtagagcttggtaagcatgagttagaaatttggaaaccactggagaatgaagagcaggggaatgtcatgatttgctatgtttttaaaatttttatattgactctgaagccgaatagcaactttcaaaagagtaaatattttccattttaattaagtccaatttatacttttttcttctatggattgtgcttttggtgtcgtgtctatgaactccctgcttagccttaagtcttcactatttcttctatgttttcttctaaaaagttagtagttttgcatttaatatttaaatctgtaatccattttggattagtttttataaaggaggtaaaacttagattgagggttttttgtttgtttttatttatttattttttttcgagacggagtttcgctcctgtcgcccaggctggagtgctgtggcacaacctcggctcactgcaagctccgccctgccgggttcacgccattctcctgcttcagcctcccgagtagctgggactacaggcgcccaccaccacgcccggctaattttttgtatttttagtagagacaggtttcaccgtgttagccaggatggtctcgatctcctgacctcgtgatccacccgcctcggcctcctaaagtgctgggactacaggtgtgagccaccgcgccctgcctagaatctcttacatgttctcactcctaagtgggagttgaacaatgagaacacatggacacagggatggggaatatcacacactggggtctgtcgggggctggggggctaggggagggatagcattaggagaaatacctaatgcagatgacaggttgatgggtgcagcaaaccaccatggcacatgtatacctatgaaacaaacctgcacattctgcacgtgtaccccagaacttaaagtaaaaaagaaaagaaaagaaattattcttcaacttcacattcttctactcactccaaagagtctattgtactccaaagcgtctattaagtatgcccttaacaagctccccatccccagagatatgttcttcatctggattttatattccaccagctgggtccttgctctgggaagttctaggtcctgatctcctggagagagtcactgtcatgtaattttcacagcagaagttagcccaagggacaggaggaggagtaagagaactgaaaccagttggggaacaggaaacagaaagcagagctccttctgatttttaatggccctaagaacacaccaatatactacttgttttaatagcagtggattgttgtgggcccatttaggaactaaagtacctgactgtgtttctcaacctcagtctttgtgggatgcagagattcaaccctctcaacctaaagggccaaggaatctgggtgtccaggacccttctctctccaagggtcaaggtaaagagaggagcaagtactgtaatgatgtcagaggcactggaaccagagcaactccatgttgaatagtagctgggtaaaattaggctgagacctactgggctgcattcccagacagtgaaggcattctaagtcacaggatgagataggagttcagcacaaaaaaacaggtcataaagaccttgctgataaaacaggttgcagtaaagaagccggccaaaagccaccaaaatcaagatggccacgagagtgacctctggtcgtcctcactgctacacccccaccagtgccatgacaggttacagatgccatggcaacgtcaggaagttaccctatatggtctaaaaaggggaggaatgaataatccaccccttgtttagcgtatcatcaagaaataaccataaaaatggccaactagcagccctcagggctactttgtctatggaatagccatgctttattcctttactttcttaataaacttgttttcactttattctatggagtcacgctgaattcttccttgtgcgagatcaagaaccctcccttggggtctggatcaggaccccttccagtaacagaagaattagagggaagcaatgaaaggcagaatgaagacgagaaggatggagaccaaaaccactgagagattgaagggaggcagagaagttgacaggacagagcatccacacccaggcaccccaagattaaccccataatttttggctccagtggaagctcatttgtaggtttctagtgcaaagaggtggtgggctttctgaaatattaggttctatccaagggtatcagagtggtatggagataaatgggaagcagagacagaaataaggtagtccacctaaaagcattattcccaaggctttgtgtcattaaggctgtttacaattttaagtagtttataatttaaaattacacctaacaatggcttaaaccaaagacaacatttatggtttatttgctttccaagaattttgcaagtgagtagtactaaattactttctgtccaaattatatcatttaataagtttattttgatcttttcactttttcatcactattttggtgtgttttttttttcctggaaattgccacctcacggccccaagatagctgccatagctcctggtctcacaatacagcatctcatgccaggaagatagggatgaaatgaaaaaatactgaaaattttagatctgaggcgagatatgttcagatttattttataaaaatttatctttgggtcctaataacaagaagcattttagaagattcccaaggaaggaagggtaagaagtatagatgtgtctaagaggcacaaggaaaccaaaatactgtgtgtgtgtgatggttgggaggggggaattaaaataagggaaatggcagaggacaccattatgcataaaggagaaggacccagatgtcaagagaaaaaaagaggcaaaggaccccacagagactaattgccaaacacatttgcaagtcttttgaagtccaattattcttcctaaaactgggttcctggatgcctctgcatgtttcccataaactctcgttattaaaacataagcagttgggtatggtggctcacacctgtaatcccagcactttgggaggtcgaggtggacggatcaccaggctggtcaggagttcgagaccagcctggccaacacggcgagaccccatctgtgctaaaaatacagaaataagccgagcatggtggcgcatgcctataatcccagctactcaggaggctgaggcaggagaatcacttgaacctgggaagtggaggttgcggtgagctgagatcatgccactgtattccaacctggttgacagatcaagactccatctaaaaaaaaaaaaaaaaaaaacaaaaaaccaaaacataagtaggttttctttcttgctacgaaatggcccatgattaacaaaaatgcctagaggcaagtaaacagaataagagtcttaaaatgaactttcactccaatggggcaaaaatcatctaaggatcgtctcagtcagacatgggtgagactcaaagtatgattcatcctgaggcaaattcctcttcagctgtaagcctgttaaatcagacaattacgtgctttcgaaaatatagtggtgggacaatctaggattgacattcccatatcaaaaaggagaaataggaaggaagaaaggggaaccagatcctgaggaagtccaaaacaatgtggcaaatacattttaaggcctcagtataatgttctttgactccatgttctgctttttggacacattggagctggggttgggccacaacagctctgggcagaaccaccatcatggctttgctgggtgtagctgatgcagcagctctcaggggctgaagtcaggtgctgtagctccccaagggtggtattgcacacaggtggctacactgttctgaggtctcaggggcagcctcacccccagggttccactggacattgccctagtggaggcactctgtggtggccccatccccgctgctgtactgggcattctcttaatgccatcatattgggggagggactctctgtggagagacagagagtctctggagacagccctctccctgagttgcatgcctgcgactccaggtagcaccttccttcaaaatctaaggggaggcagccacaaccccgcagctcatgcactctgtgccctggtggagatgacaccacacagatgtagccttggcttacagcctgtgccatccagagaagtggcctgagccgcagtctggcgtgcttgagccaaagcttggaaggccaaggagtgctatactggaatatggggaatacaatcttgaaattgtttgccgccaaaaccttgaaattgtttgcattctgtgcctgtgatgggcagggaagatgtgaagatctgtgagatgccttcagagtcattcttccattgtcttgatgaatactatctggcttctatccatgctaatctccgtatcaaatgttcacttacccacaccattggtgttctcccctgaacatacttttgcactttttacaggctgagaattttccaaatctttaggttctacttcctttttgattataattgccttttttttttttttttttttgagatggagtcttactctatcacccaggctggggtgcgcagtggcgcgatctcggcccactgcaaactctacctcccaggttcaagcaattctcttgcctcagcctctgagtagctgggattacaggtgttcaccaccacacccggctcatttttgtatttttagtagagacagagtttcactatgttggccaggctggtctcgatctcctgacctcatgatccacctgcctcggtctcccaaagtgctgggattacaggagtgagccaccgtgcctggcctataattgccattttttatgtaactcttttcctgcattttactataagcaatcaagagaagccatgccacaccctcaatgctttgcttagatgtaacttccaccaaacatcttattccatcactcagaagttctaccttccacaaagcacaaggacacagacacaattcagccaagttctttgccactttataatgaggctgtcctttcctacagtttccaataatatttctcattttcatctgagatctcatcagaatgacctacttctacatttctaccaatactctgatcattattgcaatcttcttctgagcctgtagcagaatcaccctcaacgttacattcatggaaatgtagagttttttctagcactcacaaactcttccagcctctcacattacccagttccaaagccatttccacatttttaggtatttctaattataatacctctacttcttggtacaaattagtcttttagcccatttgacctgctataacaaaatctattagagtaagttatgatccacataaatttattactcacagtactggaggatagaaaaaccaacattaaggctgggcacagtggctcatgccaccataatctcagcagtttgggatcgcttgaggccaggagtttgagaacagcctgggcaacatggcaaaatcccatctttaacagaaaaaaaaaaaaaaattagccaggcatggtggcacattcctgtaatcccagctgcttgagaggctgaggcacgagaatcccttgaactcaggaggtggaggttgcagtgagacgagattgcactgctgcactccagcctgggtgacaaagcaagactttctctcaaaaaaaaaaaggaaagaataaaaaaagaaaaaccaaggttaggatgccaacagattccatgtctgatgagggcccattactcatagacagcgccttccatatgtcctcacatggtggaagacagacaagctccctcaaggctttcttacaaaggcactaatcctatttatgagggtgcaaccatcacgctctaatctcctccctatggtcccgccttttaataccataacctagggggttaggatttcccatacaaatctggggaggggagaaacaaacattcagactgtagcagatgcagcaatagtaactttaggaatgtggaatttataaagagcactcattcttccccattccccacagccatccagtctccaaggctggtctactcagcctggacaatctgtctctaagctacgcctcttcttgatcacactattcctgccctgggtagctcttcaagaaccttaccttgatttctggcaacattctccattctaatatctctgtctccaattagaaacattctcaaaggcatccctttgcaggactacagaacaatatttttcagaagcacacacctgacaagtcactgtcctgcttaaatggttattcatgttattatgaagaaattccaagtccttcttgtagcattcaggaccctccaacagatggcttctgccacttgctacacactcagtgtttattgctgtctgcctcaccatctatgctccaataaccgcaggtaacctgctattttttgaccctttcctgcgtgctttcactctcctctgcctggaatgtatttttttttgcttctttatctgagtctttaagattcatcccggatgttatctgcattgcacttggaagtgaccctggaccctgtcagtctcagttagttgttccttttgggaaatctcataatgaaccaggcatctgtctatcactatatacccccactctactgtgactgcttagggaaatggcagaggacaccattgtgcacaaagggtgcataagactatgcttagtcacagtagagtgacgctgtcacctctttacctgggtagtcggcatctccagggtaaggcacatgtctgtttaagctctatgtctgcaggagccagcaagggagcacctcttcagaggcctcatgcaatacccaccaccctttattatactgataagtaaattccattttaatcaggtggcaggtagcaatgtgccactgtcctaggaaagcaatcatgattggcctaagccaatatgagcaacttgtcttttttttttttttttttttttttgaggtaaggtattgctcattgcccaggctcgagggcagtggcatcatcatggctcactgcagcctcaacttccctgacaaagcagtcctcccacttcacctcctgagtagctggaactacaggtccacaccaccacacccagctaatatttttttggttttagagatggggtctcactatgttgcccaggctggtcttgaactcctgagctcaagcaatcttcctgtcttggcctccccaaattctggcattacaggcgtgagccactgtccctgacctttatttttatgtatcggtatttttgttatttcttggccattgattggtctagagatggcatgctctggcaatgaaagacaaggagaggtcctgaagagactctggacaaggtttccctctgtaataaaatggaagaggcatgtgaatgagtcacattttctgcctgtctcatgattctggctcgggagggcctgttgatgcaatgtccagaacagtggcagccattctgtggtcactttcaagaaagccctagaagaaaaccaatatgatgatggagtggaagggtgacattaaactcaatttttgttcaaactccagatctatccccttccaaaactttttttaataataaatttctccatggcttatgtgcttcattggtttactctaccttatcactgaaaacatccagtgaatcagagagaaaatagaaaatagttgactcttgttttgtggctctccactgtttttcatggttctattccttgggcttgagaacaacattctgatggtgtttaaaaactcagaaagagcccatctccttagatcagtagtccatagagcatctccctaggggcagaaggttagggggttaatctcggcaatggtgtggagtgtacagtgtctctcatttaccttccttacctctctacatgctcctagttactgcttctctttgtaactctgaggtatgaaatacctcaaagcatatttgattttgtcacagatttctggcacagggctcttaaaacccttggaattccctgagtgataggagtattatttgttattcataaacagccccttttgatcatagctgagtttatgctaaggagatcatggccttaggatgggactggtcaccagaaagaccaagggattagagggttggagctgtcagccccacctactgatctccaggaaggggaggcagggactggagattgagttccataaaaactcttgaacaatgagatttgatgagcttccacattggtgaacactcaggagtgctgggagagtggctgcctgaagagagcatggaagctccatgcaccacccaaccccttccctgccatatacctgccatatgcctctttccaatggactattcctgaggtatattccttatataaagcaacagatgcaaacaaagtgctttcctgagttctgtgtgccattctagcaatttattggtgtcattggaacacccaatttatagcctgtcagtcagaagtacaagtagccacctgggacttgcaacagatgtctgatctgatctgagaacagtttgtgggagtgagccctttagcttttcggatctgagctgaatccaggtagacagcatcataaccgaatttttaattgcaggtggcccaggtggtgtccccagagaattggagaatttcttggtgtagagaaaaagtatatttggtcagaaggattgtgaaagtagagaatcgagtttttgtttcaccgtgcatctttgtttttttattgtttttcctctcattcttctcaccttggtaattgtttctttcattttcctgaatctctgaaaagaaagggcctggactctcagatttcttggcctttgatatttggaaggatgaactccagtctcccacagaaggctagaggtgaaggaacattcagacacataagtttccaagataaatcgtctgagaacatctccaaggtgtcttctgggaatggtaagaaaccctgagtttgtgtcactggattgattccagctccattgtccccgtgtccttcaactaagtctctgctgaagcctgttctataaaaacagcaagtaagtggtttggactgacctattgtactaggttcgacaaagcaaaccaaatggagtcagtcatactaaaactccacatcaccaaaccaaaactaatgtatctgaacttttgagaaatcaggagagagagaaaatggacaaattcctaaaacaggccagtttcagtgggcatgaacatgaagttctgtctgctttcatctttacaaaaaaaaaaaaaaagcaatctgtggtaacttgacttcaatcaatcagttgttccttattgctgtctctctattcctgctgcacaaaaaaaatgcaacatccagatgaccaatcaggtttttgttctctgtttctgctttctttagccctcctatccctgtaaaaccaacttccttggctctaactatcaaaacactcattttgttttatagcatgacaggctgtctgattccatctttataaccaaagccaattaagatcttaaaaccaaacatataacttcatctttttacaagtacttagagcctgagttgctccacaggaatccaggaactgggcacaggaaaaggatctaagctggtggtaagttggggtctgaaaattttaaagttattgttgaaatgcctgctatatgacagagcccttctaactctggagtagcgtagtccagtgaagaatccacttcgttagtatgaaaacaatgttaactatttcattaacagtgtttaatttggttacatgttccagtaacattctttttttttttttttttttttttttttttgatggagtcttgcgctgtcacccaggctggagtgcagtggcacaatctcagcccactgcaacctctgcctcccaggttcaagcgattctcctgcctcagcctcctgagtagctgggattacaggcacctgccaccacgcctggctaattttttgtatttttagtagagacggggtttcaatatgttggccaggctggtcttcaactcctgacctcgtgatctgcccacctcggcctcccaaagtgctgggattacaggcgtgagccaatgtgactggccaattctttatcatatatgtaattaaataaaatttattactaaaataatttccccaaaggtgttttacttttttaaaaacagtggctacaaaaaaattttgagtcccatatgtagctaaagttaacacattatatttctactggacatgtagcattgtagagatgtagcattgaaggatcttgatagtcctgtggagcttacgtactagtgtggagggtatttaagagagaagataaatgaacaaacaaataaaggagaaaagtatctggtgagataggctgtacctgagcattctgctttgcagagtgggtgaggtgggatctctctgaaataatatttgacctgaaatatgaatattcaggatgagccaggtgcaggaagctcaagacgaagagcacggtaggcagaaggaatagagaaagcagaagccctgagatgacaaagagctgcaagttcaaggaattagagcccagtgggtggagcccagtgtgtctgatgagagtgcagagatgaggtctgagggatgcacagggcacatgtggcagtggataagggaacctaggataagggaacctaagataagggtaacttagaagtctggaagccatcggaaggtattgcgaataacatcaccatcttattggacctttttaaagctcatttggtttctgtctggagaatggatcttaggggagggggcagcaggaccaggaaaaagctatttgcaaggcttgtgcaaatatccaagcctgacagggccatggacaccggtcgtggagatggcaatggctctggctgtgcattcagcatgttctgtagatagaatgagtaagacgtggatggcgttgggtggtgaggaaaagagaaatgaaaggtgagttctagatctggagctttaacaactgaatatttaatctccaaatagatacagaatattggaagagtggcaggtctgggaggcagagaacatcaacagtttggtaaaaccatgtgaggtttggagtctatgggactcccacggggagaggttttatcagacttgagtgccagggagaggccacggctgataatttagatgaaaagacagcataatggtttaatcccagagactggatgatatcatttatagaatgtgagataccccaacatttagagtcaaatttagaatagaaaacaccgtaaattggactaaaaagaggaagagaatcgagctgtagagacgaccaagagtgtattgtgtgcacatatctcttggatatatctcatggcataggaaaaatgtgtttgaaaagggagaaagtgatccaatgggtcctgtgtcattgggatatcaggtcttaaaaactgagaaggactcactggatttggcagcctgggggtcataagcatccttgggaaaatgcattaggtggagtgctaaggacagaagtcaatgtggagtggattaaggagaacagctgaggcgaagaaggaaaaggaagaattagagacattctctttggatgtttggctggaaattctgtcttacagacagaccttacagagaggtcatttggctagatagggttgaagctggaaagaaatatgcttcaaaggaggtttctcttgaaagagagggggcgtgattatgtgatagaatgatctagtagaaatacaattttcaatttttttggtataaaaaatgatcttttatccctcaccacatcccacctcaatctaagtcttaactttctcgtctgtacaatggttatacaaattaaaactaacattaatcaatattcaccgtgtctcagggtgtgttgagtgcttacacatattaacacatcccatccacagagcctatgagaggagttgtgagggttaagggagaagctcttggtgtgtggataatgttcataagtagaagctactattgctataagcatcgttcttgtcctgaccctgagcttcatagtgcagggttcgggattgtaccccacaacacaacacacagcctggtgagggctaagagttctaatttgttacagatttaccgacctatcctagatgatttccatgtctattctttttttttttttttttttttttgagacggagtctcgctctgttgccaagctggagtgtagtggtgcaatctcagctcactgcaacctctgcctcctgggttcaagcgattcccccacctcagcctccagtccatgtctattctatttaatcctcccctgaaaatcagtctttatcaaaaaaccatttcagttctgcagaggggaaaatgggggctcaaagagatgtcactgatcaagaatttacaccatcgaggtgtcagagataagatcagagtagagatctaactgactccaaagcctggtactctttacactgttacagtgacacccaactggcagggggagggggtgggaggtattttgcctcccaggggatctttgacaatgtcttttggttgtcactcctgaatggggagttgctactggcatctctggatagcggccaggggtgccgctaaacatcctactgtgtacagaacagtccaccacaacaaagaattaaccagcccaaaatgccattggtgtcaaagctgagaaaccctgagctacactaaacaatgtccctgggaagacctcagtgaaagtgactgataatgataggaaaaaagaaggaaatgagtaaaagaaataggagaaaaaatttattatacgagggcaggaccctatcctggtaattttggaagaacgcctttcaatggcagcacttgagcgtgcaaaggtagtggctctgttcggtctggtttacaaatcttcctgtctccactgactggctaggtatgatgctgaaaaaactacaggagtccctgggccatggattctccctagtaaaaaagggatgatgatggctgcctcacagtgttattatgagtattagatgtaaacaagtgctacataattgctatcattcttaaagaggctaaatagcccagggtgggaagattctcagattttcatgatcatagaaaattgctgtagcttggctgggcgtggtggctcacacctgtaatcccagcactttgggaggccgaggagttcgagacagcctggccaacatggtgaaaccccatctctactaaaaatacaaaaaattagccgggcgtggtggtggtgcccagctactggggaggctgaggcagaagaattacttgaacccaggaggcgaaggttgcagtgagccgagatcacaccgctgcagtccagctgggtgacagaggaaaaaagggaaccattcggacatttgcccctgaacttgaagtgcgccacaccccactcccactgccagttgccacccccgtcagctctctttctgcctgtcctcttgctcctctgagtgtggcctccagatgtctcatgtacctcccggggtctgtgaatactaaaacctctcgaactttaacactgtcgtcgcctcattgaagccgcacccacaatccaacccacgatgtgaggctgcccgaaagcgacctgggcagttggatcccctcttgatgttcttttgtcctgacctctggtggctgctgaggatggtcactagcagctgagttgatagagaaacttgaagagcttcatttaatactactggcatagcaggcaggcttttggctgtgtcttggacacaatcccaatgtctgtgtgtgtggatgactcacgcacttcctgcatcagacagcccagtcggtctggcccagacggcactactgcttgctggtgctccattttgctgcttcgtgcagcttagtactgctgtcctcagcagttaacttggagattctccagaaattccagtgaccgtggacggctctttgaggctccaggctccccagcagctgcaggagggcagatcctattgtaatgagggtgtttccctgtgggacatcagaaaccctttctgggatcaggcccctgacagggggccactactggagggcatgttgccccttgagccatacatgcttctctggtgacctagggcctcggtagtggtccggcctgtattggctctaagtagcaaagtactggcctccagccagagagagctggccaggatgctgagctggccacccggtagcccatggctcgatcctcagctctacctccatcttgctgatgatagggccatgggccaccaggctcctggggagcagcgattccaccatagtgaagttgaagaggatgacagaatgctggcttcagtgtgtcagtgaaggggagctgggtgaaagggtccagtcgcctaactctaacctgtgacacggcaactgcacctgagtccccagggcaccttgcaagagccggtgctgctgaggccagtgcctccttggttgctgcattccttggtgctatcacttctcgttctcccagcccctcagaggtcgatcgggtcaccctggaaagaaaagcggctgcctacaaggccagtgcaagtggagctcattgttcggttttgaagagaaagtgagattaaagaaagacacacaaagacagagtgtctcaacagcaaatgcaggcatttatgtccagtataaacctgcagaggtgccagtgcccaccactgcttacaggctggggcaattacaggcctgggtgggagaggtctggaagtggagcatggcccgttgcctgggaaaatgttgataacatgttcccatgatgaggcggtttggcacttgttcctgcagaatgtgatagtgatgttccttgggcctttgcccggcagagtgtgataaggatgttcgtgtgccttgtggtcaggtggttgggcaggatgtttctcatggcccgaaaccccatggaatgtttcactttgaccaaagtctgcaaaatggtggggggcttacaaagtggtgcagtttggactaactctcaataccatttttttttcttttttggtaacaatgtgtaaagtgaaaacagcagagtgctactccataccactgggatcttgtccagtaaacatccagagagtgaggttaggaaataaaaagtatataaatattagatgcctagaaatgcaagtcactttaaagattttatgtgaaatagaaaaaaaagagaggagagggactcattgtcttgtaatgggtccttcccagagagaggtgactgtccagtggcaccgggcccttttcctccttccccttttactcttatcaactaggacagaaactaagaattttggcttcaagtggctaaaagactgatgggggaaaaaagaaaatagaaaaaaataacagagagactgacgctctaggcagttacaagtccaagaaaaaagacagaaacttttaactttaagtattgagccaaaaccaggtctagcaaacataatgctggccctagattatttattaatttatgaagaaacttctagatatgggggtgacaaaaggaaattaaatccattatatatgcatatattttaatgtaaatatataatagataaattatgtatacataatatagaaccaaattgaaacagttttacaatttggtttgactggaaattcaaaatccatatattaatttttgtagtaaaagtttatgtaaaaaaagacaaaaaggacactgattggcttttgttcctctacaatataggttctaacttaacttctaacattagcggccggacgcggtggctcacgcccgtaatcccagcactttaggaggccgaagtgggcagatcacctgaggtcaagagttcgagatcagcctggccaacatggtgaaaccccatctctactaaaagtacagaaattaaccgggcgtgatgctgggtgcctgtaatcccagctactcaggaggctgaggcaggacaattgcttgaacctgggaggtggaggttgcagtgagccgagattgtgctactgcactccagctgcacgaattgacaaaatttatggacttcatagtgggattcaaattatagttatacatagggatctcattaaatttacttactctactcccataatcttgagaagctaactaaaattttgaaaaatgagtagacctcactttatctgtagcgtcgcctaaatttcccagtcatacagtcattgctctaaaatattctatgttggacatagattctgtgacacaattaataacaaattaaaattaaagtaagcttttggcacttacaaattggcttgatcaaatgaggccccttagtcccccagttaagataatttattacggcccaatagaagttgaaacagcaccttcaaggattaaaatttattatataaaaccgaattaataaaagcgtgattatcgacaccacatctccatttagcaacccaaaagttcttcctgttcccaaatctgaaaaaaaaaaaattcgtaaaaatgccttacgatggatgactacagcagacgggctgttgagggctgcctcagctcttcagcccagaccagtgacagagctaccaacactgcttcacctcctgcagaggtagaggtacaggcaatgagaggagggggtcagggatattttttagccctttctcatcctaccctcatgccagtcccagctttatctacccttgagtcatattaagccattcaaggatgagtggatgaagtttttaatcaggaaaaaatacttccatgccccccaatttgagagtaagaaatagaaaatgaggctattgtgggtgtcatttctaatttctggacctcagcctgtaccctggggtaagtggaagtggaaaaaaactacaagaaaacagaaagagtggtggggatttgtaaggcttggatgagatagtatatattaaagggaaaacttaattactttacccttaagtgtaatgtttgctgtcacctttttgtatctttctctttttaatcagactgttgaaggtgtcttctattcttactttttaagagttctcttcttctattgcttaaattatgaatggatgttaaatgttttcaaatgtaatatctgccaatattaacatgattatttttattctttcatttacatcgttacagattattttattgtatacaactgtatacaaacttcatatggttcctttcatataataagaatgtaagctgtctgagggcaggaattgtggtctgtattgcttacagatgaatcctcaccctctatgtgtaaaatagtgtctgacatgtggtaggcactcaataaatactgaattaatgaatcaataaatagtgtcacctagatatttaagtgagaaacatttgatgtctaattaaaattatctctgttacaaattattttattaaattaaattaatttaactaaaattaaaataacgtgaaccaagtcatgtctagtaaattctcatcctcatgtgcgcaatatttataaattcccaggtggcttccattttcatgaacaccttaaattttgagtttccacttcaatacagtactctcactaacaactgcctaatgactttgtatttaaataaataaactcataactcagccctttaccttgctttctccacaaaaacactcagaaattgtcaattttgtattgtgtaacatactttcctgatgcactggcaaaagacaccactcaacatgaataccaaggaatcctgttatcaatgtcctctctcactccactgctttactcattcttctcgtcttctctagagttctgtgcatttccaaggcagagcagtttgaccatttcattcacacttttgactcctataaatgctttcaatttccaaaaaaaaaaaaaaaatgtatattctttaatgcccaactaagttgtggccatagaaaatgaggaacaatgaaaaaaatgcaagacagaaagtcaggagccacgaaggacagcgtgagacctctagataggagagccagggcttccagatgggctaattaatagactccctctactgccaggacaggggattcttacctttccttcccactggccttggttaattgcagtagaacagtgtccgctacatctcccttttttcttttcctcattaggagtttccattgtggattcccaattctcattgcatcgtggtatattggggctttgaagctaagtattcttttaagttatgggacacttatcacaaagaaacttcaacataaaacgttggggatctcatccttgggaaggatggctctacttcttctatttggaagaagagtgtaaagggatcttgagtacctgaaggcataattctggccaagactgacagctgcctaaccaacattaatcacccttcttcactgcagtgaatgcttataagggtctgttgcctcggcatccagtctaaatacaagcttaattttctcatacgaggctcagggctcagtcacccttgacacagtttccagttctacaccacagtcacgagtacaagaaaaaaaaaagaggaactttaaatttaagtactgggcagaatccagatctaggaaacgtaatcctagccctggaatacttactgatttatgaacaaacttctaatgggagggtgataaaaaggaaattaaatacatcatatgtatatatgtatataatattttaatgtaaacataggacaaataggtgaattatgtacatttaatatataaccgcatcaaaacaaagttttacaatttgatttgattgggaattcaaaattcatatattaatttttataccaaaaaaattatgtaacaaaaggataaaaaggcactgatttggttttgtgcctttacaacataggtactaacttaacttcaacaacagcaaaaatgctcaaattgacaaaaatttatggactttacattggggctcaaattatagttatatatgaggatctatcgagcacccgattctgtggctgttcggggcgccactatgtaacctgccatgatccctggtggactgaacaaaggggggtgaatgcaggaataaaagacaagagacaaaagagtatatttggaagaaggggtccgggggcaccttgcctctagtggacaaggccctgagctttacacggccctctgtatttattagagaaaagcgatagtgagaaggggggtggaagaagaggtcagttggttggtccagagtaggcttgcaagactgcattctctagatgttccagtagataacttcaaagagcttggcgtcaggaagcgattgccctcagcaaaccttctggcggcaggcacagtcgtgagtttgctcacatcctgtattcatgataaacagtttgctgtttgatcatatagcctccagtggaatgctgagttggtcacgtcccatgggccttcggctccctgcatatccccctgtttatgaattaattgaaagaatgtaagaccaggctgggcagctctcattctccgattggcggtccatccgattttacagactataaacagaagacagagacaaaacaacattactccaagaactacatataagatgttactgtggtactttagataggtccaagggttgaggctctccaggccttcctggaattcagtccagtcttctaaagaaggctgaaattcttgagtgtgcctatttaaatcaagaattttgttttgtaattcactaatatcaaaggtgatgttggatgtgaaagctccttgcaaatgggctttcacaaggtcccacggatactcacttttgttatattctaagttggttacacaaatacgagtgtgattaaaatgacagcgcaattgccgctgcaactgcaagctttatacttgttcccctaaccacagaaccatggatttcaacattgccacttcagtttgtaactcagtgttaattttattctgaagtagcctcgcttggttggctgtacgtgtccaattctctacgtactgagccgtttgaacagaactatgcaaagttacagaggacatcacaacagaagttattagtgtgaccaaggaaacgatagcaaaaattatcatgcctaaggctctacgggcacaataagtaacctgaagtagaagaagtttcacaaaatgcaaagcaggtgtggcagcccaagcctcggacagattaacaggaatccctagcccagggatgcaacctaaaatcatcaaagtcgagatattatgtgttcgcaatgtgctatgattaatgcagtgatataactggcaagatttacaggtcaactgggtattgtttacctggagctggtccttctgagctgccaaaaagacataaggattaaaaacacaaaccacaaattgagtggtgatattctttacaaatgtaacattaagactgtgtcgtgactccagtcggccttctctccatctttgcactcaggctcagctgactcatggctcgtaccggagggactgggcccatggttggccaccccatgtttctccagtctcccattccagggttgcaagcaccttgagggcacccacatggcttgtcaatctcctgtaaacacacaagcataccctcttccccatgtcagtaaatccaccgggcctttccattgtccttcttctggggatttccataacactttcagataaactttcctcttttcctctaacacttgccaatgtctttctgctggagtcttaccatccgtaccaggagtcaaaaattttaaagtaaataaggctaaatgtagttttgattgaggtggtagttggcctcctataccccctttttgtcttttcaacattcgttgtaatgtttgatgtgcccattctataatgccttgtcctctaggattataaggaattcctgttttatgggttatagcccaaagctgtaggaaattttgaaaagcatgactagtataagcaggtccattgtcaatttttaattgtttaggtattcccatatgagcaaatgatgacagacaatgtcgctgtacatgaccagctgtctcacctgtttggcatgtaccatgcagcatatgagaataagtgaaacaaattaagcagttctgggtctagcgtacttttaactgtagcagtttctatgcgaatggctaaatttacaacataagctgaacaagaagaatctccttgcagggtttggtaaagatgtgtaagttgataggtagcaatacctaacatcgggcgtagccaattaatatctcctaataattgctgaaaatcatttaaagtctgtaacctgtctttatggttgacaatgttgattgtagcctgccacgatccctgatggactgaacaaaggggacgagcgtgggaataaaagacaagagataaaagagtatatttggaagaagcggtcagggggcagcttgcctctagtggacaatggccctgagctttacacagccctccgtatttatcaggcaaaagagatagcaggaagtggggggggtggttgctggctagcagcctgattcacagcaggcttgcaagactgcattcttaaaacagtaggcgctagatttctcaatagataactctcaatagataacttcaaggagccagggagtgaggccctccacaaaccttttggtggcagcgcagtgtgagtttgccacatcctgcattcatgataaacagtttgctgtttgatcatatagcctccagtggaatgctgagttggtcacgtcccatgggccttcgggtccctgcagttgataggatctgaagctgtgagctgtaaaacctcacagctgactgcaactagctctgagcattgacctgaaaccccagagatccttattgtttgagtatgttttagtccatagatggcagcatgacctttggaagagccatcagtaaaataagtctgtccacctggaataggtttgtgatgagtaatcacaggaagaatgaaagaatggattttataaaactgtaaaattttgtctgagagtagtggttatctatcacgcccatgaagtctgcgaaagcagtttgccaggcagtcgacatttcccaagctgcagcttgttgctgagagtctaaaggaacaataattttgtcaggatcatatcctgtaagcatttgtgacctatgcctgcccatagtcacaatttgtgtaattaaagaaagataaacttgcaaggttttgactgtttgattagatagaaagaaccattctattactgttacagactagtctataaactggcccaaaagtcctgttggagagtagggggtaggaagaataaacaaaagcaaaggtttttgtggttgtagccatgaggcatgtctctgctgtaacatttgctctacaagctgtaatttggcttctgcctctttagttagttgctgcagggaatttaaagaatctccgtgcagggtttggtaaatatgtgtaagttgataggtagcaatacctaacatcggtcatggccaattaatatctcctaataactgctgaaaatcatttaaagtctataacctgtctttatggagaactactttctgagtccatacacttctctctgtaacaatagttcctaagtattggtatggggaagttgtttgtaccttttctagagctattttgagattccatttagtcaaagcctgctttgtttctctgaataactgatgtaggttttgatctgtaggagcagccaaaagaatatcatccatataatgaatgatgtaagcagtaggaaacatattccgaggcttctttaatgcctgtcctacaaaatgctgacatagcgtaagactgttaagcatgccttggggtaaaactctccattgataatgagaaacaggttctctttgattaatagaaggcacagagaatgcaaatcaaggcttatccttctcgtgtaagggtgtagtaaagaaacaatccttaagatctattactacaagaggccagtctcttggaatagccgctggagatggtgaaagtttttgtaaggcacccatcagttttatgtgtacatgaatagctcttaaatcatgtagtagtcgccatcttccggacttttttggaaaaacaaacactggagaattccaagcttatgtgtccggcatcccattgttcttttactagctgctgaagttgcatcaggttctcctgagataggggccattgatccacccacacgggtttgtcactgagccattctaatagtgaggcagtgggcagaggagaaatatcaatgaccctcgtcagaaatcctgacgtcctagcccttttctatctgtttttccagttactgatattgggttaggatttccttgaagaaattttcctaaacattttcccctctgatatctcatgttcttcaacattttaaatcctgggttatcaaagttttcatttgtaagtctcatattccatgttataagtaagtctcaaccccataaattgatagctatattttcaacataagactgaaaagtacatgactgtccatctggaccaagacaaggtaaaatctcagtgctctgttgaacactttgagctgttcctactcccactagggatgtagaagttaattgcaagggccaggatgggggccaactgtctttagatatgactgacacatcagctcccgtatccataagcccataaaatttctttcctttaatgtgtactacacaggtaggtctattagaggctatgggttgggatagatagatttctcatgtagttgtgctcccaacctctttattttctcatttctcctttcatggagaagggtgtgatttgcagggaataagcaataattgagcagtatattgtcccagctcaaaacccaaagatcttgtgacattaaaactacttgaatttctccttcataatcagagtcaacaacttctgggactacagtaatgccctgtaagttaaggcagattttgcctaaaattagtttcacatatcctgctgataaaggtccccaaatatcagtgggaactttgatgggtttgtctgccccaactaacattacccattctttgactgggagatctaatcctgcactccttgtgttcctggggtgagggaatcaatgtgcctctgggaacccatgcctggaacggggttgaggtctggactgggaatgccctcattgtttgtggggcctgggtccaggcccccatctcatttcccagcaggggggtgccattctgatgaaattttgagcggcactgattagcccagttatttcctctgttacgcaaggacaaagtcctggcattttttccactgggtggggcactgcattgtaaggtcctttctgtactgagatctggcggcattcctttttaaaatgtccaggtttttcacaattataacattttcccactttagggtttgacccttggctccttttagatttgtcaactgctaaattagccactgcttgcgctaatattgcaaagtgatgaagctcagttcctacatcttgacaagctctgagaaaacttcccaagttttttatacacctcaccagtgccagtgcatgtttacaatccgcgtttgcatcctcaaaagctagagttaaggttagcatttctgcagccgtggtatgaggaatctgacgcttcactgcctcttgtgatcttgtaagaaattgcacatagggttcctgtgacccttgcatatgtaaaaaggattgtactgggactccctcttcaggaattgcggcccaggtgcatttaacagcctgtgcacactgctgataagcagcgtctgggagtgccatttgactttccaggtctgaataagggccattacctaatagcatatcctctgtaatgtctccgtgtccagcaacatggttctgtttagcctggtctgcacacatttcttgccaatttaaattccatgtcagatatgcactagtggacaagcaagttcgcatcaagtgtctcacatcaaagggtaaaaaacgcatagcaccaaacacagattctagcaatcctaaggtcaaccggctctgtatgccattatttaccactctcgcttttaattccttcaacaacttactctagtggggtgtgttcatgaataacctgctgtggattgttgggatcaggccttatggaaataggaaaagtgcaaggtcctaggggctctccagctatggcagcagagcataaaattctttgtattggggtctctagttctgctaccaaaggaggcaatacagatgtttctgcaactggaggaggctgtataggccaatttttatcctccctctcctgttttttattttcatctggagctgtgagtgggacaacagattctttcagatttttagattcagcctgttgtcccacagaataataaggagataatggcagaagtacagtatgaactaaactccaagtggagaaaacagaaggatcaattttaagacctttttgatgagcccattttaatccttctgctctgtcccaattttccacatcaagggtgctgcctgtggaaaccatgggttatgtgtaataacctcctgcagcagctaagttaatgtctgagaactaacctgagcaccagtttgtttcaacagaactctaagcaactgcacataattatttttttcagtagacgaattctgccccatgttaccgtgattcagaaaacttcccattcccagtacttctttaaggaactgatcccagtacctctttaggcgctgacctcatgtgcgctgccagctgactcatcccagggtccccatttgcgttgtcaatttcagttcctctattccaggagatcttcttcattcacatcctcatagtcccgtgttcagactgtcgcctgtttgagtgccacttgtagagcccctgattctgtcgctgttcggggcaccactatgtaacgtgccatgatccctggtggactgaacaaagggggatgaacacgggaataaaagacaagagacaaaagagtatctctggaagaaggagttagggggcaccttgcctctagtggacaaggagctcggcaccaggaggcgactcgccctcagcaaaccctctggcagtgggagtagtcgtgagtttgcccacatcctgcattcatgataaacagtttgctgtttgatcatatagcctccagtggaatgatgagttggtcatatcccatggggtcttcggctccctgcaaggatcccactaaatgtactcactttgcccatattgtcttgagaaggcaactacatataaaattttgaaaaatgagtatacctcgctttaactacagccttgcctaaattacccatagtcatacctattgttctaaaatagcctatgttggaggtaggttgctctaaaacagaatatgttggaggtagacataataaataatacattaaaattaaagtaaattgtttgcacttagagattggcttgataaaatgggatcacttagtcccccagttaagatagttaatatggcccaacgtagggtgaaataatggccttcaataattaaaatttgttaaacaaaacgtgattaataaaagggtgactatccacattgcatctccacttaacagcccaaagtgcttcttgttcccatatctgaaaataaaaaatatcacaaagaatgtcttatgatggatgactacagcactaaggctgtagtcccatctatcagggcccccatatctaacatctaatattattaaaaattgctaatactattcaatcaagaactggtaaacattttgctctcattcatttggctagcatgttctgttaagtgcttatttctacagaccctcagctacagttgcctccacctctgaagaaacacaatacacctttccaggctacctaggggtaccctcatagctttggcatcacacacaagctttgcagacaggagcttaatgacatccacagtctccataagcacaggtgcagcattacattgaggacaacctcctctaagaagattcacttgatacacacattacagtcatttaattcgtctcttagtccattcaaggtactataacaaaatttattatgctggataatttgtaaacaacataaatttaggccagacgtgggggctcatgcctgtaatctcagcattttgagagtctgaggtgggtgaatcacctgaggttacaagtttgagaccagcctggccaacatggtgaaactctgtctctacccaaaaatacaaaaattagcaggcatggtggtgaacctgtagttctagctactggggaggctgaggtaagggaattggttgaaccctggagatggaggttgcaatgggccgagatcacgccactgcactccagcatgggtgacagagtgatgctctgtctcaacacacacacacacacacacacacacacacacacacacacaccccataaatttattgatcacagttctgggggctgtaaagtccaagatcaaggtgctagcagatgcagtatctggtgagggccattactcacagacagtgctttctatgagtcctcacatggtaaaagggaaagacaagtgcctataggactcttataaggcactcatcctacctatgagggcagaacaatcataattgaaaacctccaccttttaataccatcaccttggtatgagcaacctcatttatatttttatttttatttttatttttggcccagggaatgatctaaggatgtcatgtttcagtggtgaaagataaggacaggtcctgaagagactctgaaggagtctttataaaggaggatgggatgttttccttttttttgagacagagtctcactctgtcacctaggctggagtgcagtggcgtgatctcggctcactgcaagctccacctcccgggttcacgccattttcccacctcagcctcccgaatatctgggactagaggtgcctgccaccacgcccagctaattttgcttttgtatttttagtagagatgggttttcactgtgttagccaggatggactcgatctcctgacctcgtgatccacccacctcggcctcccaaagtgctgggattacaggcataagccaccgcagctggccgatgttttcctcctttataaaatgagacaggcatgtgaatgaagccagtttttttgtttatcttcatccttctggctctggagggcccgttgatgtgatgtccagaacagtggcagccattctgtggtcactttcaagaagcccctggaagaaagccaataggatggtgaagcaaagggcttaaatgaaaaccaatttttatttagactcagattctatctccttgcaaaactttttgtaatagtaaattccttcttggtttatgtgcttcatatgtttactatactttatcactgaaaacatcctttggtatagtgattcggggagaaaagaaaaaatagttgactcctgttttctgcgtctccacttgtcttcatggttgtgttgtttcagccggaggacaatgtcctgatgttgcttaaaatctcagaaagggcccatctcctccgatttagacctttaactcttctcagattaagatatttgaactaaatttgttgtaattttgtctattaactaatccttagagctgcgttgcaggtcccacaaattatctccctctggagcagaaggttaaggggttaatcttggtaatgatattggataacgggtactctctcatgcatctgcctcacctctcaaggtttttgttttttgtttgttttgtttttttgttttgagacagagtccagctctgtcacccaggatgaagtgcagtggtgtgatctcggctcactgcaacctccatctgctgggttcaagtgattctcctgccgcagtctcctgagcagctgggactacaggcatgtgccattctgctgggctaatttttgtatttttagtaaagatgggttttcgccatgttggccaggctggtcttgaactcctgactcgggtgatctgcccacctcggcctcccaaagtgcagggattacaggcatgagccactgcactcggcctaaaaaccactttttttgtttgtttggtttggtttgagacacagtctcactctgtcccacaggctggagtgcagtggcgccatctcagctcactgcaacctccacctcctgggttcaagagattctcctgccccagcctccaaagtagctgggactacagccgcctgccaccacgtctggctaattttcgtatttttagtagaggcggggtttcaccttgttgcccaggctggtcctgaactcccgacctcaaatgatccgcccacctcggcctcccaaattgctgggattgcaggcgcgagccaccttttatcacatctcattttatgttagtgaggttatttagggcgaggtcccttgataggctcaggttagggctgaccaccacaaaaatcaagtgactagagggttggagctttcagccccacccattgactttcaggaaggggaagtggggactggagattgagctctataaaaaaatgttggctgggtgcagtggctcatgcctgtaatcccagcactctcgaaggccgaggtgggtggatctcaaagtcaggaattcgagaccagcctggccaacatgatgaaactctatctctactgaaaatacaaaaattagccaggcatggtgatgtgcgcctgtagccccagctactcaggagactgaggcaggagaattgcttgaactgcttgaacctgggaggtggaggttgcagtgagccaagatcccgccactgcactccagcctgagggacagggtgagactctgtctaaaaaaaaaaaaggtagacaccaggcacggtggctcacacttgtcatcccagcactttgtgaggccaaggtgggcagatcgctttaagcccaggagtttgaaaccagtctaggatacatggcgaaaccctgtttgtacaaaaaattagtcaggcgtggtatctcacgcctgtagtccccactacttaggaggctgaggctggagaatcccttgagcccagggaagtggaggttacagtgagcagcgatcatgccactagactccagcctgggtgatagaatgagaccctgtctcaaaaaaaaaagaaaaaagaaaaaagaaaaagaagaagaaaaagaaaagaaaagaaattagccaggcatggttccaggtacctacagtcccagcaactcaggaggctgaggtgggaggatcacttgagcccaggagtttgaggctgcagtgagctgtgactgcaccactacaccccagactggggaagagagtgagatcctattaaaaaaaaaaaaaaaacccttgagaaatgagattagatgagcttcttgagttggtgaacacaaagaggtgccggaaggctgagtgcctgaagagagagcatggaagctccatgtaccacctcaacctctcccttgctatatacttgccctatgcatctattttgactgtttttgagctgtattcttttctccttttttttgagacagaatctcactctattgcccaggcttggagtacagtggcatgatctcggctgactacaacctcttcttcctgggttcaaatgattctcgtgcctcagcctcctcagtagctggaattactggcatgtgccactacacccggttaatttttgtgtttttagtagagacaaggttttgccacattggccagactggtctccaaatcctggcctcaagtgatccaccagcctcagactctcaaagtgctgggattactggcgtgaaccaccatgcctggcctaagatgtactctttagaataaaccaataaatgaaagcaaagtgatttattgtgttctgcatgccattctagcaaattacaaagctgatgagggggtcacaggaacccctgatttatagcccatcagtcagaagtacaggtggccacatgggacttgcattggtatctgaagtgaagacagtcttgtgggagtgagacctttaacttgtgcgatctgatgctatctccagttagacagcatcagaactgaatttcattgtaggatagacagtggtgtctccagagaattggagacttgctctgtttggaaaaaagcccacacatatgctgttagaagtatgtgtgtaaatagagaagtgagtttttgcttaatcatacatctttgttgtttattgttttcctctcattttttcaccttggtaattttttgtttcatttccctgaatctctgaagaagaaagggcctggactctcatattccttgacccttgttatttggagggatgaactccagtctcccacagaaggttagaggtgaaggaacattcagacacataggtttctaagatgagtagtttgatgacatctccaaggtgtcttctgggaatggtaagaaaccctgagtttctgtcactggattgattccagctccattgttcccttgtccttcagcaaagtctctgctgaagcctattatgtaaaaatcacaggacaccattggtttaaactgagctactgtactacactcaacaaacaaaaccaaaatagagtcactcatactaaagttctatgtcaccaaaccaaaaactaagttgtttatctggctttccaagaaatcataaagagagagagagagagagaaaatagccaaattcccaaacaggtcactttcagtagccatgaaaatgcctctgctttaatccttacaaaagaagtaacgtaagtaaccatgtcagtcaatctgttttgtttttttttttaaattattgtttccctattcccactgtatggaaaaagcaactttgaaatgaccattcagcttttttttctttgtttctgctttctttagccctcctctccctataaaatcaaacttctctgttctactcatcaatacaggcattctgttttgagggatgaggtgttgtctgattctagaattatgaataaagccaataaaaactttacactaaattagttgtaattttgtcttttgacaaatccttggagcttgtgttgctcgacaggaagccagggactggccacaagaaaaggaactcagctagtggtaagttggggtctggcaatctaaaaattattgttggaatgcctgctgtatgacagacatttcctaaactctggagcagggctgtgcgatgaagtatctacttgccaaatacagcttttttgttttgttttgttttttcagtcttttttttttcttttttcttttctttacttttcttttattatactttaagttttaggaaatgatgagttcacgtcctttttagggacatggacgaagctggaaaccatcattctcagcaaactgtcgcaaggacaaatacagcttttgagtgcttgctatttttctcatttaaccttaagtgtgctataaatataaaatgcatctcatgtcttctaagacttagtatgaaaaaagaacgccatgtatctcattaataatttttattctgattaaatgttccaatgataccctttttgatatataggattcaagaaaatatattattggtgttaatttcccaaatgtttcctactctgtttacacatggttacctgaaaactataagacacaaacacggcccgtgtttacagaccacattgtgtttccattggacagtgctatgctagagacacagcactgaaagaaggtgctacttgtggagtttgtatatcagtgcagaaagtatttatgatagaaaataaatgaacaaacaaataagaaaagcatctggtgacataggctggacctggggcagctgttttgcaaatgggttaagagaatacctctgaggacaagatatttaagctaaaatataaatattcagaaagagccaggtgtggaaaactccagaggaagatcatagtaggcagaaggaagagagaaagcaaaagccctgaaatggcaagaagctggcatggtcagggaatcaaggagtccaccatgggtccagcacagtgtgtcaggtgagagtgcagagatgaggtctggggatacacaagacaaatctcagggtgcttgagaagtgtgagttagaaatgtggaagccatagaagagtgctgagaagaataacatcattgtcttatttttccttttgaaatataatttgtctgtgtctggattttagcagagggaatagcaggaccaggaacaaactatctgcaaagtttgtacaaatatccaagcctgacagggccatggacatgggtagtggagatggagatggctctggctgtgcattcagcatgttctgtagatataatcaataggacttggattgtattgggtggtaaggaaaatgaaaggtgagttctacatttagagctttaataactgaatatttaaactccaaatagatacagaatattggaagaatggcaggtttgggaggaagggacaagcaacagtttagtttgggcaatgttgggtttggagtgtctatgggactgcaggggagatatcaagaagtcaattggttatatgagactagagctcctggggaggccagtgctaataattcagatgagaggatagcatggtactttaagctgtgatactgaatgatatcacctatagaatgtgggacaccctaaatttagagacatttagagcagaaaactggactgaaaagaggtggccaattgagctgtaaagacaaccaagagtggattgtgtgtacatcttatcatcttatgatatggaaaaaaaatgtgtttgaagtaggagaaagagatccagtggttcctatgtcactggaacatcaggataaaaactgagaaaggtccactggatttggcagtctggaggtcatgtgtatccttaggagagtgcattagctggagtgctaaggactaaagtcaatatagaatggattcagcagaataggtgaggtgagaaaaaaaaagcaagcaattagagacaaccatttctaaagtttggctaggaattctctttacagaaaacacttctcttaaagaaatagggttgaagcttggaaagaaatatgggccaagattggtttctttttaaagggaagggataggataatggttacttggtaacaagaaggatctagtagaaatcaaatcttgagggtttctttttagcagaaagcagaaggacaaataccatttcttgggaagacgagagacagtgggatggaaagcaaatgtaaagagggaagtcactgggaaaaagaagtctttattcacaatagcaagggcacgtaaattgagggttaggaaagaaaaggctaaaaaatgcacatctaattgttacagttttctcattaaaattcagccaaggccatcagctgagagtggaatagtagaggaagttggttagtttgaggagaaagcagaagggctgaatgttattttaatgcatcagaaatcacacgtgctggagaagcacagatgctaacaaggaagtgccgagtttccattatagattacattccaatctgtaatcatacatccagttgtacctctcaataattgtgacattgaacaagtcacttcccctctctgagccatggtttcctatggattatacaagaacaatatttgtcccagagcaaggatgttgtaattagaaataataaaatacacattggttgatacacattgggattgcaccaaatagcagccctcataatcagtacaggtatcatctctggtccacggttctcttctccactttgtaactagggtggatccaaaattttacaacattgtcttgttggcctgtccccacctgtcactgcacattgttggaatgtgtcaacatttccaaatgacttagagattattgatacatcatactgtctgaatgtcttctaggatatttggagagtggtagagaaaatctgagtctgttgaggaactagggaatgggagagggttaaccatacaattctgttgaaatcagtctgattgagctccaactctggttctacccctttctgactgggggctttaaataattaatgtaaccaatataagtcaacttcctcatgtgtacaatggttatactaattaaaactaaggttagtcaatattcaccgtgtctcaaggtgtgctcagtgctcacacagattaacacgtctcatctgcagaggctgtgagagcagttgttagggttaaaggagaagctcttggcatgtgagtaatgttcataagtagtagccactattgctatgagcattgttcttgtcctgaccttgagcttcaaaaggcacgacccaggattgagccccatgacacagcacacagcctggtgaggaccagaagttcccatttgtcacagacactcagtctagcctagaagatttccatgtccagtctcacttaatcctcacctgaaagttagacttcaccacaaaactgtccttgttctgcagaggagaaaactgaggctcaaagagatatcactgaccaagaacccatattggcaaggtgccaacgataagagtagcgatctaactgaccccaaagcccagtgttctttactctgtaacagtgatgctcaactggggggagttttgcctcccacgggacctttgacaatgtctatagacactttcagttgtcactcctgaagggggagttgctactagcatcggtggatagaggccaggggtgttgctaaatatcctactgtgcacagaacagtcccccacaacaaagaattacacagccccaattgtctgtagtgccaacgttgagaaaccttgagctacattaaacaatgtcccatgaaagacctcagtgaaagtgactggtaatgacaggaagaaaagaaggaagagagaaagggaaaggaggaaaaaaccatgatactagggtatgaccacatgctggaaatatctggggaactcctttcaaatgcagcattttagagttgcaacggtagtggctctaaagttgctcatcctgaatttcaaatcttgctgcctccactgaccggctggacatgatgctgaaaaaaaaaaacctacaaaaaccccaaggccatgaattccctctggtacaaaaaggggtaatgatggctgcccacaatgttattatgagtattatttgtgaacaagtgctgtataattgctgttacttttagagaggctggatatcccaaggtaggaagagtctctaattttcctggccataaaaatcactgtagcttttacacagagagattctagagttgggttcatgaatatgcattttaacaaataccttggatgtttctgatacagcccacagaccacagtataagcaaatttggtcaagtggcaaagacacaagggacacagagacctttgggttgagttggatgcaacagcttcccatgtgacctggtgcagaggcagggactgtaattttgtgattctgtttcttaaaagcaaggaaatagatcccagaaagatgccaggatatcctcccatagtgttattgcccagaatttagtcatgtttccaccaataaagcaatcccttgcaaagcaaaaggaattctagttagaacaaattagaaaatcaagatatgcccgcaaagatggaggagggataccttcccccaaaagagtgagtaactgaacaaaattgcgatttgatttgcagagaagaaatgaggaacagttatttgtggggggagggggcatcaccagcaatatctgtcagaattgttgcatagagaaagggcttagaagtcagactaagctagattaaagatctttgtctactgtttcctacttaagtgaccagcagatttcacaattgctctcaacattgagtcattcctgtggaaactacaaacaatgaatattacagagctactatgcagaccaaactacaacccatatgtagcaattaacacagtgaatagtctctgataagaaccctacaaatactagctaaatattcatgctcattctgtttatcccacagaccttgaagatatacaacggatgctaagtagggacaatgaaaagcagacgggagaaagtaaatatagggccctctttgttgacttcatctagcacagaatctataggatgtaatatatttctgctctttttttttgtggggggaaatggaatctactctgacatccagactgaagtgcagtggcacgatcttggctcactgcaacctctgcctcccaggttcaagcaattctcctgcctcagcctcctaagtagctggagttacaggctcttgccaccacacctggctaatttttgcatttttagtagagatggagtttcaccatgttggccaggccagtctccaactcctgatctcaagtgatccactctcctcaacctcctaaagtgctggggttacaggcatgagtcaccacgcccggcctatagcatgtaatatatgtctatatattacaagtaatggttcaaaatcctcttcagctaactcaatccaaaccctaaaacttcaaattaaatatcaactaaaaaataggtcaagggtcctcacagtgggagggacaggagctgggagactgggagagcatggggccgaaagaagttgcagagcttgccagcatgtttgcattgagtgatggaggccacagatgtgaaccttctgactctgagtcttgtgccttcctcacgaagctgaagctgcctatgctcaattttccattgtccatacactctcagttcagtatttccgctggtggacagagccctttaatcctcttggtaatcagcttgataggtggcatgcatattaataatgatgggaatatagagaactatcgtttcccaaaggaactccgagagagtgccaattttatgttataaccattcacaaggctcactggggagggtctgctggtaggaggaggagctacagtggaagttaatgaatagttgtattgtaagatggtgtcacagctgagaaatggccattgctgaaatgtttcaggtgtgggaagatggaaaccaacttctccattcctctgaatgaaactgaggaggtgctccctgagcctgctggccacaccgttctgtggatcttctcattgctagtccacggagtcacctttgtcttcggggtcctgggcaatgggcttgtgatctgggtggctggattccggatgacacgcacagtcaacaccatctgttacctgaacctggccctagctgacttctctttcagtgccatcctaccattccgaatggtctcagtcgccatgagagaaaaatggccttttggctcattcctatgtaagttagttcatgttatgatagacatcaacctgtttgtcagtgtctacctgatcaccatcattgctctggaccgctgtatttgtgtcctgcatccagcctgggcccagaaccatcgcaccatgagtctggccaagagggtgatgacgggactctggattttcaccatagtccttaccttaccaaatttcatcttctggactacaataagtactacgaatggggacacatactgtattttcaactttgcattctggggtgacactgctgtagagaggttgaacgtgttcattaccatggccaaggtctttctgatcctccacttcattattggcttcagcgtgcctatgtccatcatcacagtctgctatgggatcatcgctgccaaaattcacagaaaccacatgattaaatccagccgtcccttacgtgtcttcgctgctgtggtggcttctttcttcatctgttggttcccttatgaactaattggcattctaatggcagtctggctcaaagagatgttgttaaatggcaaatacaaaatcattcttgtcctgattaacccaacaagctccttggccttttttaacagctgcctcaacccaattctctacgtctttatgggtcgtaacttccaagaaagactgattcgctctttgcccactagtttggagagggccctgactgaggtccctgactcagcccagaccagcaacacagacaccacttctgcttcacctcctgaggagacggagttacaagcaatgtgaggtcggggatatttttgggctctgtctctttctaccctgcgttaagcggaaaaaaaaaattctgacagtgtttttcttcctctttcataccaccaccaccacaatcatcaacataaaggaagtctgtaccaaatctgtagggggtttttcccacaaccaagcaatagacaccagctgggtgtcctacaattaaattccaacactatctacctggagctactgtcagatcccacaggtttaagggctcattccccaagtctgctcctccagttgagacacaagtcacaaatccaggcttctgaaacttcggaccaaccagcttcaatcagggttcccactaccccctctttgggggtagagtggctcatggaactcagagaaacatttatttcggcttgctggtttattataaaagcaaggtttattataaaagatactacaaaggatacagatgaagaggcacatagggcaaggtacggggttccacgccctccctgagtgcatcaccctctgggaacctccgtgtgttcacgtctcatgaagctctccaaatccagtcctcttgggtttttatggaagcttcatgatgtcagcattctttcctccagtgtataggatgggatcctctctggggagggtcttaagacccacaattagaaaggcaagggaagattagagtcctgctttggggtagatgaaaggaaaggagagagattctgtttcctgaggcttaatacacccaacattataacaaaggactgtagcaagggctatgggagttctgaagcagaaaccatgggctaaaaccaacatacatcttaataccagataccctaatcccagtcctaacttcatttaaccttggtcacattgagtcattccaggatgagtggctcaagtatttcctcagggaaaatacttctgtgccccctgatttgagggtaagaagtagataatgaggccactgtgggtgttattttttcatgtctggacctcagcctatatcctgagactaagtggaagtgggaaaagagtacaagagaagagacaaagtggggatatttgtaaggcttagatgagatagtgtttttttagaaaaaaactttatcttaccattaagtaaaatgtttgccataggctttctggggctttctctttttaaagtcagactgttgaaggtttcttctattcttatttgttaagagttttcttttattgtttaaatcatgaatgaatgttgaattttattaaatgcagtttctgtaaatattaacgtgatcatattatttttattctttcatttacataattataaattagattaagttttcaatgttaagctacccttgcatttatgaaataaaccacgcttgctcatgatggtttttgaacatttataatctgtctcacagatttgtttagaatttctgtatttatgtttatgtagagatggctctgttatttcacttttctctactgtccttgttagcttttacataaaacttagttttcctgaaaggagtttggaagtgattttctgattctatcctcgggtattatatctttgttaaacatttagaaaaatttgctagtgaagccaactggatcttgggtttgctttttgggaaggcttttaaatataggttcgatttctttaacaattattagacctggcagttttctttttcacattgttcacttttggtaaactgtgattttcaaattcaaggaatttggccatttcatcccaattaccaaacttttgtaatcacccagtgggttctccctgcctgctgcacagacaaaaccagtttactgagactgtagtattgcagtaaagaaagatgcagtattgcagtaaacatgatgctggccacatggatgaactggagttatcagtcaaatcagtttccctcaaggctgagagattatggtttttcaaagatagtttggtgggcaggagactagggaatgggtgctgctgactggttgggaaggcaatcataggagagtggaaagtggtcctcaagcactgagtctgccttggagtgagggggtcacaggaccacttgagtcataagtcatgagccctggtaaggtcagtcagttgctagaatgcaagtctgaaaaacatctcaaaagactaatcctaggttctacaatagaggtgttacctatagaagtgattggggaagtcacaaatcttggtctttactgcccaggtgtctctggccacatgacgtctggcaataaaggattatagaaactataatcctacattttagcagaattcagactccttgaataatcctaatcttagggcctttcattacttttcagtctcagagcaagaagggtgttagttagggaaggcctactatcatccttgcttccatgttaaactataaactaaattcttccccagttatcttagcctacaaccaggagtgaacaaagacagataacctttgaggctagaggcaggaaggagtcagccacgttagatttctctcactgtcaaaatttttgcaaatgtggtttcacttattggcatgagacagtataataactgtatggtacttgatatgtttctttcaagtaatgagaatgtaagctatctgagggcaggtattttggtctatattgtttgctgatggatcccaatcccctgcaaataagatagtgtctgatatgtgataggcactcaataaatgtttatggcattgataaacaataatatcacttaatgtccagtcaaaattatctccagccctcataatatgaatcaggtcaggtctagtaaattcccatcctcatgtccacagtatttgtaaattcccagctggcttacattttcatgaacatttctgattttgagtttctgcttaagtaaactactctggttaaccattgcctaaagacttcatatttaaataaataactcataactcagccctttaccttgctttctgcacataaacactcagaaattgtcaattctgtattgtgaacatactttcctgatgcactggcaaaagacaccactcaacatgaatatcaggcaatcctgttatcagtgttctcactcaccccactgctttactcattttcttctccttttcccttctgtctctcctaaagttattgcatttccaaggcagagcactttgcgcatttcatttgcacgtttgactcctataaatgctttagagttcccaggaggtgtatattcttaaatgcccagccaaggtgtagccatagaaaataaggaacaaggctgggcatgatggctgactccagtaatcccagcactttgggaggccgaggtgagtggatcatttgaggtcaagagttctagaccagcctggccaacatgttgaaacgctgtctgtactaaaaatacaaaaattatctgggcatggtggtgtgcacctataatcccagctacttggaagactgaggaaggagaattgtttgaacctgggaggtgaaggttgcaatgagctgagaatgtgccactgcactctagcctgggagacagagaaagattccatctcaaaaaaaaaaaaaggagaagaaaaagaaaaagaaaataaaaaggcacaaggacaaaacctagataggagagccagggcttccagatgggctaattaagagacttcctccactgccaggacaggggattcttactattccttcccactggccttggttaattgcagtagaacagtgcctgctacatcctctccatttttcttttcctctttaggagttttcattgtggagtctcaattcccattgcattatgatatattgtgggttcaggaaactgagattttttttttaaagttatgggacagttaccacaaagaaatacttcccaatgtatgtccatgtggatggctcactaacttcctgtatcaggcctggtcggtctgggacagcactactgcttgctggttttagattttttgttgctttgtgcaacttagtactgctgttgtcaggtgttgccttggggactctccagaaactctggtgaatatagacagctctctgagccttcaggctcccctgcagctcctggagggcaggtttcattgtaatgaggatgtttcgctatgaacagtagtcactctttctctaatcaggcccctggtgacaggccactacttgagggcacgttgtcccttgagctatatatgctgctcttgttacatggggtcttggtagtagtctggcctgtactgggtataagttgcaaagtcctggtctccagccagagtgagctggccagtatggtgaaactctatgtccatctctgccagggtccaacctggccgaatgacagatgaaaaatgcactctgagactgatatccagtgaaaaagcaggctaggggactgggcagctcacagacaccgaggagggagctgtaaagagtcagtagccacagccccgacaagctggcactgtgggcatttattcagtacagatttaatgacaaaggcctggagtcaacacgtcttgtgggtaattaacattgtcaccccccaccccccaagacagcagtcctgtgcacagatgattaaataccaggttccgaggcctaagtaaactaacttatctagatcaattcctttacacttccttgttatccattctgagaaaattcagctgccttcagccaaatcctcttctgaagctatgcaaatcccaggccttccaagaaggtttgcatccttttcctataatttatcttacaacttttcccaccatcctgaccgatctcctacacatctcactgatgagagagccacaggataccaggctcctgggtagcagcaattccctcatagtgaagtcagaaaagatgataaaatgctgggcttcagtgtgttgataaaggagagccaggatgaaaggatcaagtcacctaagcctaacctgtaatatggcaactgcacaagtccccttggcaattttcaagagcaagtgctgctgaggccagtgcctccttggttgctgcattccttcctgctatcactccttgtccccactagccactcagaggtcaagtggggcaccttcaaaagggaaacaactgcccacaaggccagtgcaaatggagctcacccccagatgtttttagtaacaatttgtaaagtcaaaacaacagggtgccaaacccaaggtcatctagattttctcctgttatcttctaggagttttataattttgtcttttacatttaggtctgtgatccattttgagtcctatttatctggtggaaacctgactgacatagcatatgcttctagtgtttaaaaaaaaaaaaaaaaacagaggaaagatgaagcattaactaatataaattagtagaaattgagtggaagaaatgaaaatagtctctctgtctactttatcatgccattttctttttgtgtttttgccatcagcatatacatctgttctctaatctactaactgaaaacataaaaaccttttgtaccacacgcgtcctcctgaactttacaacaaatttctctgctctccttgacagcaaactcaagggtcacttccagtttctttctctacttcctcatttcacattttctccagaactcattctaaatgggttcatgtcctgattactgcagtgggactactcttatcaaggacaacagtgacatccattgccatgttactgcactgcaggttcagacatttggtgcttgcctatgaatccaatggagtaaatctaagtcatatatgcttatctgataatgatgggaatcttaggcccctaagcatatatgactcagttgtccacacccttttattttaaaatatataattctcttggtgacatcacacttgtttggttttcttcctacctcagtgatttatctttctcaatctccttgactggctcttttctgacttttaaatgttggtgtacccgagggctcaattctagacccccctcatctatttgcatcaatgcagtcatcctaggtaatgtgttcctataacttgaaatcccatctgtacataaatgactccccctaaacatccatcataatccacaacttctcttcaggactccagactggtatctacctccctcctctgcatttccacttgaaaacctatggggcatcatcaaagtaaaactatcaatttgattccccctgaaacagttgcttgacaaatcttctacatttcttccaaatttaggaaaagtcatcacactctaccaaatgtcttaagtcccaaatataagtaattattgattctttattttatttatttattttttatgagatggagtctcactctgttgtccaggctggagtgctgtggtgcgatcttcactcaccgcaacctctgcctccaaggttcaagcaattatcctgcttcagcctcctaagtagttggggttacaaggttcatgccaccccgcctggctaatatttgtatttttagtagagatggggtttcaccatgttggccaggctggtctcaaactcctgatctcaagtgatccacctgccttggcctcccaaagtgcaaggattacaagcatgagccactgcacccggcctattgattcttttaatctaatccatcaccatatcccattgactctatgtcaaaaacgtggaccaaatctgtgtgtttctttcctgtccactaccacctgacttcaaaccatcatcatccggaccactacaatagtttcctaatctttctgcattcactcttgctctacagcaatcagttatttacacagcagccaaagttttttttttctaatataaacatgatcgtgcccatctcttgattaacaccctccaatagcttcccatcatgctaataataaaaacatctgaatccactatctgactcccaaagcctcatattatctggcttttgcctgtccttctgatggtcttcctcaacagtttttctttcatcgattatgttagtaattacactagtaatatctttatttctcaaacataccaaatcattcttgtctcagaatctttgtactaactgttgtcctgcttggaatattcttcctcttgaactttcatgtgaccagttcatgtaattctaatctcagtttaaacataacctcctcagaacatttttttctgagtccctaagataacgtagcctctcaggctctctccagtctagttcagcaaatattttagttcttttcatagcacttgttgtagctttttgtcaatcacaaaatcacctcccttctctcattctttgctggtctgagagcctttgacgcctctgtttttcttcatctattgtagcagcctccacattcatctgtcatttttcagtgagaaagagagtgggtatccagaaaatgaggtctgaaccatatacagcagagtttgttaagcctgaggtagacacctggtagccattaaaagatacagagcaatgtgatgatctgctctatttttttttaatttgtattgagtctaaagcttaaccataattttctttttttatttttattttttatttttttgagacaaggtcttactctgtttcccaggctagagtgcagtggtgcaatctcagctcactgcagcctctgccccctgggctcaagtgatcctcctgcctcagcctcccaagtagctgggactggaggtgcaaaccaccatgcctggctaatcaaccataaaaatttttcatttttatgaagtccaacttattccttttttacagattgtgcttttggtgtcatgtcaaagaattctttggttagctcttggtcctggacattttttaatgttttctcctaaaaatgtagtagttctacatttaatatttaaatctataatccatctttaattatcttttgcaaagaatgtgaggcttaggttgagtttcttttttgttaatatttttaatgtccaattacgccagtatcatttgttgaaaataatattctttcttcattgaattttttacgtatgtcaaaagtcaatattgtgtgtggatctatttccggactctattgtgttccattggtctgtctaccgtttagccaatatcacactgtcttgataattgtagcttaatagcaagtcttgacatactccaatgttgttccttttcaaaagtaatttggctattttagttcctttgcctttcgatataaatttttagaattaggttaatgtttttttaacttgaatcacattgaatctatggatttgcttgaagaagaactgatgtcttaatcatattctgtctgcagtactctcttattcagtactaatctttcaactctatctgccttgttcttcccaactcccaactttatcttcttatttcaaagagtctaccgggctctacctgtgtttcccctcctactctgtggcctgggaactctctcaagtcagtaatcaaggcaatcacgggaatcatcttatttgtttccccttttttggagattacaatgctatactacctgttgtccagtgtcagaaaaccattctttcccattttccctagatttttagttgtttaaggtaggagcataaatctggtctctcttatgccatcaccgctggaagtagttatgttgattgtgttttaaaaagtcattttttgcttctgttcatggagagagagagctgtttgcaaaagctagttcaggcatccagacaagagatggcatgagcctgtaggtgattcttggggtgcataaaatcagcagcacttggattttgcttaccaaatgagagaaaaatcaataataaattttagacttggcacttaatctactgagaggacaatgcctctgattcctaaaagaaagaaaactgaggaaggggcaggtcagggaataggagaactggggatactgttttcagaatgtttagtttgtcatgcctactgcttgtgttcacagaaattccaagaagttgactgattttatgaggctggaattttgggaagtggtcagggctgatggtttagattaacagttaggggtacaatatatttttttcttttagttttagttcacatcgtaattgtacatgtttaagggatacagagtgatatgttgatacatgcatacaatgtgtataatagtcaaatcagggtaattagcacatccatcacctaaaacatttatcatttctctatgtggtgaagattcaaaatcctctcctctagcttttcaaaaacacacaatagatttttttttttctagccacttatgtagctacaaaaatagtactggagtaggggcagggtcttgctctgtcacccaggctggagtgcagtggcacaatcatagctcactgcagccttaaaaccctgggctcaagtgatcctccacctcagtctctggagtagctgaggcatgtgcagccacactccttttatttatttatttgttttgtggaaacaaggtcacactatgttgcccaggcaaactcctggcctcaagatacagagaattaaaaagcacaatcaagtaacctaactgacatttataaaccatttcttacacctaagagtaggatatttcacataatacccaatataattcttttcaagtgctgggttataaaataagttttaataaaaatctaaggctttaaattatactaagtatattccatgaccataatctatcaaattaaaaaccagcaataacaacataactagcaaatgcccaaatctttggaaactaaacaacatatatgtaaataacccatgggccaaataaatcttaatgaagattagaaaatatttttaactgaaggataagaggagtacatttcaaattttgtgatttaaagctaaagacagtgtgcacacgatttttttttttaagacagggtcttgctctgtcactcaagctgcagtgaagtggcagaatcacggctcactgcagcttcaacctcttgggctcaagcaatcctcctgcctcagcctcctgaatggctgaggttataggcactcaccaccacatctggctaatttttaaatttttttgtagaggtggggtcttgctatgttgtccagactgctcttgaactcctggcctcaagcaatcatccaacctgagcctcccttacaggggaatttttaccttaagtgtttttattagagaataagtgtgtgaactcaatgatctaagtttacatttcaagaagctagaaaaatatcaaattaaatctaaagaaaatataagaaaataacttttaaaagtggaaataaatgaaatagagatcaatagaagaggaaatattaaagttatgttaagatatcaataaaatggataagtttctagcaatactaatcaagaaaaaagagaaaatacaaatgaccaatcttaggaatgaaaaaaggaacattattacagagactaaacacactaaaatgatattacaaatcactttataacattatatttgacaatttagatgaaatggacaaattccttgaaaagcacacatatgaaactgtcataaaaagaattagaaaatctaaatagtccaatacctagtaaagaaattgaatttctaatcaatacccattaaaaaaaaaaaaaacttcaggcttgcattgtttcacctgtgaattctactgaatatttaagaaagaagtaacatcagtcttacaagaaacacttccaaaagacagggaaaaaaggaacacttactagtttacttttaaatacatctgttcaatacaaaaattgtgcttgaagaataaagtgatttttatgaactgaagttaaaattaatattaataaattttttattttaaccaatatttcagaaaagttatgttttcactgacatggccagacataactgaaatcagtatctttttttttgagacagtcttgctctgttccccaggctggagtgcaatggcacgatctcggctcactgcaacctccgcctccctggttcaagcaattctcctgtctcagcctcctgagtagctcgaatcacagatgcctgccaccacgcccagctaatttttgtatttttagtagagatggggtttcaccatgttggtcaggctggtcttgaactactgacctcaggtgatccacctgccttggcctcccaaagtgctgggattacaggcgtgagccaccgcacccgaccttgaaatcaatatcttaagtaatgtttggatcatgcaattttaaagtgacacatactttacacattagtggttttaaaaagtttttctcacattgatgtcatggcaataaatggaagaaaaaaatacctagttcttgaaaacaataataaaaacctttgtttctaatgattactcatcatgtggaaatttgcagtgaaaccaaaatgaagccaagtaatttaatttctactcttcaaaaatctctgtatgtagtatttctggagtatctgactagtataataaggtttttttgcctttattgtcagacacttcattaaatcttaaggtggtaaaaacagtgtgaaatcatcataaaatcttaccattcaaataaatgtacttatgttttacactttttgaaatagatattctgacgggggtaagataatatctcattgtggttttgatttgcatttctctgacgatttgtgatgtttggcttttttaatgtacctgttggccatttctatgtcttcttctgaaaaacgtctattcatgtcctttgcttacgttttaatggaattaccagttctgttgttgtttccacacgaacattttcagatgaacattcattgagattttattcataaaagtcaaacctggaagtaactcagatgtctgtcaactggtgagtggatacactatagcatatctgtatgatggaatgttagagttaaaaaggaattgctaataaatgcaacaacattgtgaacaaaagttcctgaaaagggctgggtgcagtagctcacgcctgtaataccagcactttgggaggctgcggcgggtggatcacctgaggtcaggagttcaagaccagcataggcaacatggtgaaatccagtctctactaaaaatacaaaaattatacgggcatggtggcacgcacctgtaatcccagctacttgggaggcagaggcaggagaactgcttgaacccaggaggcagaggttgcagtgagcccagagggcgccactgcaccccagcctgggtgacagagtgagactctgtctcaaaaaaaaaaaaaaaagaaaagaaaagaaaaaattatctgaaaaggaatgtgaaggaaacagactttattccagcaaaaggctgcaaactacagaaacacaatctttgttgtaaaatgaaggtgtgttccagggaacagagggaaggctccggttttaaagcaaaagtttctgcccaggttccctatcacctatgttgctatcacctatgttgatgccaagaaagagtgaaacttacttagttcttattggttaacacagctcagtcctgattggttgatacagctgagcgctgattggccagggaaggtgaactctgattggttgcttcaggtgagctctgattggttggtttccaagccccaaaattaaaaggtgtgagttttgaggggacttagagtacctgtatgacctctagacagcaaatggctggtaggttctattttaaatttaagcccaagtaaccatacaggatccatcccaaaagactggctctttcaaattcacatttgttcacaacatgaatgcatctcaaaagcattatgctaagtgcacaaagtcagacacaaaaaactatctcttatataattccatatgtgtgacgttctagattacaaataactatagtaacagaaatgaggtgagtggctgtcagggaacaggaggtggggaaaggggatcaataattgcaaaggggcacaaaaaaactttggagtcaatataaatatctattttcagatgatggttacatgataatatttatagtccattttcatttataagtatagctacaaaaatcctaaataaaatattagcaaaccatatcccaaaatatatagaaaaatattgtactatgactaagttgcatttattacagaagtgcaaaggaactgatttatgccaaccacctgactgagcttggagccagcttcttcccccatcttcagataaaaacccagcccagatgacaccttggtttgattttgaccttgagatcctatgcagaacattcagccaaacgcattcagatgcctgacctacagagctatgagctaaaacatgagtgttgtttcacactgctaaatttgtagtcatttctacatagcaacagagaacaaatacaaatattataatactatttataaaacttaaaaatctaaatattgagttctttaggtatccacatataagtgcatatttctaaaaatcaaggaaatcacatacacaattctagatggaaatttttagcggggtgggagtattggaatgattaggcaaatacacgattgatgcaaagatgggacagaaatgaaagactgtcattagcatattatcaaacattacctttattaagcaaaaaaagccaatggttaaatatgcatttaaatgtttaattagaaactaaattattcgttgtgcacatgtaccctagaacttaaagtataataaaaaatttttttttaaaatagccattctccctggtataagagggttaaaaaaagaaactaaatttttatatttattatataattatataaatatttatatataagtataaacataaatatatataaatttatattaaattaaatagaatttaattttaaatttaatttaaaagtttaaatatgcgtttaacctgatctgctttatgtatttaagaaaatgaaatatccatactatgcagttcaatttaataacatagtacaaaagataagtttggtatagatggtaaattgtagatgcttttactattactgcctggttttttatttacaagcatgtaacaatttttgtaataaataattgttgtaaggagatctttatttaaaatcctcagaagttttcaaatatgtactcaaagataaattcatataggaaaacgaactatatgaaagcagaaaaggaaaagttaattagataattaaaattgccacagaaaggtatatatttgaataataataaaagaacatttctcaattatctactataaaccaggcactttgctagcatttcaggcacaccattccaataatcttcaaaagaaatttgcaaaggagataccatcattttttcctaacagtaaaacttacagcatttcaataccttgcccaaagtcatgcagacagtaaatagcaaaatcggcataaagaatcaggactaaaatgttatttcaaaggattcatcaagaaataaattatgttagccaggcgtggttgagcatgcctttagtcctagttactcagcaggccgagacaggaggatcacttgagcccaggaggttgaggctgcagtaagctatgatcacccctctgcactccagcctgggtgacagagcaagactctttctctaatgattaaacataataataataagaagaaattacacacacatacccatacacatataccaagtatttatgacacaattttaataattgctgaatctaggtgatgggtacacaggtgaccaccatgttgctattccttcagtgtacttgaaaggtttcagtatgaaatgttgggaaatatggttgggtacttagtacagcacccaaatccctggcatctgaagcaatgaagtacctccttccccagcccttcccatcaccgatagccataatggcccccaactccgcatcgcttgctcgcttttcctggttccccagacaccgacttccactcgacgctgaggatgctccaatccagaccacagaagccctcagtggctaacccccagcttcagattccactgaccattccctgaagccttcttacaccgcaaacctccacaagtaccccatgctggtcgcatccggtcaaggaccccaacagcgctgggaaactcaccctacagctggagtcgcacaaacattcgcttgaggactagcaggtttccgtaacctcttcactcactgccgtagtcacgctcttgtgcagactcagtagcaccttcgcggaacacaagatgtctacagactttgaaaccaggcgtgcacatggaagcagcagtcttggaagatgcttcttacagatagcgagatggccattttctggcgactaaattccatcgtgctagaaaggaaagaggcaatgcagctgatcttctactgtccttttcaccacttccccagctgctaccagcagcgttgtgcattctcaggaacaacattcagcgttctcacctgtctacttcaaatctagcaacagccctaagccaatcacagacaagacctaagcagaagatggctgcacctatttagccccataggcccttaaagcagcaggtaaggcgcagccatatttgaaaaagttttgggatctgttgatcaaagactaggcagtggagcaaggaagtgggagcaggcagagggtggattctgggaatgtgtttgtcgagagaagtcttaggaaaccagaattgggtctggaggagctcaggtagtaagggggaagccacctgggtacatttgggtgtgggattgtggagagagaccttgaggggtaagaactgggccaaactggttgtggagcagacactgacaaccacaacccattccaagagaatattagttgtacttcagaaagatcatgtgtattctgaacagtcatgtgaaatagatgtaaaagtcatgaagaaattattagcaatcaaatctagcattatatgaaaagaatgaacttcaagatcaggttcccaggaatacaaggatgttttatcccttaaaaataaatacatgtaatgtatggtgccagccatgattaagtaagccccctagtttatcactcccactggttagagttaaaacttttgaaaaaaaactaataaaaactacttgagaacttttaaaatgaataattgcaaagagattggagaataaagtatagagttgaaaaccaagcaatgcacagagtaagttccctcattttttttctgtctatatctcctgcctttgacctaagggtaagacaaattaggaaattgttagtccaaactgcaccattttggaagccccccaccatttcacaaaacctgatcaaagtgaaacattccacagggggttcgggctgtgagaaacatcctgcctcttatcatattctgctgggagaaagtgcaaggaacaccactttccgcgggaatcgcctcatcctgggaacatgtccccccaggcccctctcacccaggcctataaattgccccagcctataagcggtgggcactggcattaggctgtttcctcacttctgcaggtcttatgctggacataaagcctgcatttgctgtagagccaccactccatgtctttctttaacccttgccttcccttcaaaacctaacagaaatttcgctgctgaggtgaagagcaaggacactaagaaaaaccagccttcatggccagaaaacagagaaaatgaatccacatgagccaaaaagtgtgttgtggggatctctattttattttattttttccgtttttctagtttttctagcatggtcttgctagttctactgttgaaactgcactgccacagtactggcagtgacatggacacctaaaactcaagaaaaaaaatctatagatagaaaatattaggcccgatgcggtggctcatgcctgtaatctcagcactttggggggccaaggcgggtggatcacctggggtcaggagtttgaggccaggctggccaacatggtgaaacctcatctgtactaaaaatacaaaaattagccaggcatggtggcaggcacctgtaatcccacctacttgggaggctgaggcaggagaatcagttgaatctttctgatgccaatcataagcttgccacattagttctagagaataacaaacaaaaaacaatgaattctaccattatcatgaaatggagagggatggaatctcaagttcatatacaagaaaaattcagaaagtgatctgcagatacacagtgtaagtctgagacattcaataaaagaaatatataataggcttgaaggacacaggtgtcatcaaacttggaaaagattctaggaatatttgaaagcatactagaagaggtctataaatattggtaggaggtgaagggtggttgtatctaataggctgcaaaagaaaagtgactaagcaaaaaggcaagggccaaataggcaagaatctcaaccagagggagaaagagaggcacatctcctatgagtcatacatagaaatatagtgctatggtctgatgtgtcccccaaaactcatctgctagaaagttaatcctcagtgcagcagtgacagggaagtggggcctaatgggaggtgtctaggtcatgagggctccacctcatgagcaagttaatgccatgataaaaaggccttgtgggagtgggtttgctactttttgctctcctgccatatgagaacccaacattcatccttacttgccgttctattatctgccatgtgaggatgctgcaaaaaggccctcagcagataccagatactggtaccctgatcttggacttcccagcctgcagaactgtgagaaataaatttcaattatttataaattaccctgtctcaagtattttgttatagcagcacaagtggactatgacagatagtaagaggaggagaaattgttcatattgaagacctcttttcacttatactctaagtcacccttaaaggttcacagaccatgagaaaatgtattaaaataacaagggtgccaacccatcaatggccaactagtactttggttccactaactcccatcgcattggtttcactcacctggactgcaccaacttgggaattctctctctactattccttgttcttctttccccaactggaatattgcttctggcttggtagcttgacaacctgtcaagaggtaatcacagagaatctgagcagcattagagcttgtgagaaaaagttctgtttcaggaaatgcacagtatacatctcagcagaacagaaacctttcatttggaaagtgaaattacatatggtcactgtacgattataaagtaaaaaaagttctaaaagtcaaagtccaaaatcattgaggatatcagagtacccacaaattgtggcaatagaaaaaaaggcaattaatcggcttacagtgagatatttaggaaagttgtctttacccagtgacactaggttgttgtaattttccaacatcacatcctggtagaggttcttctgaacagggtctaatagattccactcctcccaggtgaagtcaacagccacatcattgaatgatgataaaccctataataacataatccttttaaattctggagttaatataataaaattcagtctataagactcgtaggacattattctctttatctttaccacaaagattcacaaacgaagattttcctgtgcctagttttggtttgcactttgtgagtggaatacattaaaaactatcttttctttgtgcattcttcattcacttgtttactctttcattcatttgcccgatgtaaagtgtcttttaaacctttaaactacctaaaaaccatctgtaacccaccttaggagcatttaatgtaattcattatacatattacaataaaaacaataaaggttagtccttccttcaagtgtttctgatcttgcacagagtagcaaatacagtcctatgcagaaagcctatgtattgcatggtattatggattagcaaggactaagacagaagtatgctcaagctaatatgtgagcacaattaggtaaggccataattgttctgaagaggtagacaagctggtagcatgattagtagtgcgttctaaaggaagaagtggaagaaatgggggcttccttggaagggggcaacatatgtatctgtattaaataccattctgcgttcaaagaaatgcaaatagttcattaagacaggagaagctgaagagaagaaatgcccatttgaaaagcaggaacatgtcttggagcaaagggtacacatttccttaagatactcgatagccactacacttttttttttttttttttttttacataagtaagttacggtcagaattgcattttggaaattgtgctacaaattaaatgatgatactcataaagaaaaacagacttcttactatgtgctatgtatcattctacaaattttacatatattaacataataatctgcacaataacccttgtttaagcactattatgttctttttataaagaagagattttaagtttcctagctgtgccttttatatctcccacatttccttaaagattactgttcactgggtccatatgctggcacacaaaaactgaagaggaagaggaagatccatcagagacatttcttcacactggatgcccaggaaatatttactgatatcaacgattttatgtgctttctccttctggacaaagtaaatcttgtaacttttaaaaattctcttgtgatggttgtcagtactgccacaaaaatgtttgcaacttaattctagatcctgctacttatatggcaattgtctaattattagcacctttcaggaccctacgacatggagatagatctcccttcctaactggctactcttgatcatttattctgtctcctagtctaaccacatccctgccagccagagtgtacttatattcatttttctctttgattacatatatggttataaacttctaaaaatctactgggaagtaaataaacacctcacttggaactttgtcatgttcaagagctttcagaagatggccagtacttttagtatctgtttgtcctgcaattctgataatgtctcatcaagggtatcctcaacaaagatgaatttctggacatgagatatacttttttcctttacaggagctgcctcattctaagaagtcagcatctatgaattcaaacaaaaatgtgttttaaagtagaaataataaagagcaagtccgcgtaaataaaaagacttttctttttaaaattaattcatttcctatacctaacaaataaaattgtatgtatttatcagtacaatacgttgttttgaaataagtatatactgtggaatggctaaatcaaactaattaacatatgtattacttcacatacttgccatatttttgtggtgtgaacacttgaaatctattctcttaagcaattttcaagagtacaatacttggccgggcacggtggctcacacctgtaatcccagcactttgggaggcagaggcaggcggatcacctgaggtcggagtttgagaccagcctgatcaacatggagaaacccggtcactactaaaaataccaaattatccgtggtggtgtatgcctgtaatcccagctacccgggaggctgaggcaggagaatcgcttgaacccgggaggtggaggttatggtcagcgaagattgcaccattgcactccaacctgggcaacaagagcaaaactctgcctcaaaaaaaaaaagaaaagaaataatacaataccttgttatttactacagtcaccatgttgtacaatagatctcttaaacataaaagttcatgtcttatctaactgaaattttttattctttcaccaacatttccacaaccctctccctcccccagccttggtaaccaccattctactctccatttctatgaattcaataattttagatttcacacataagtgagatcatgcaatatttgtctttctctgtgaggcttatttcacttaacataatgtattccaagttcatctatgttgtcaccaagtgacaggatttccttcttttttgtggctcaagagtattccattgtgtatatatgccacgttttcttcattcattgttgttggacacctaggttgattacctctcttggctattgtgaataacactgcaatgaacatgggagtgcagctatatctgcaaagtgctgatttcatttcctttcgatatgtgcccagtagtaggattgctgcattatatggtggttctatttttttttttttgagacagagtcttgctctgttgtccaggctggagtgcagtggcactgtcatggctgactgcagccccaacctcccaagctcaagcaatcctcccacctcagcctcctgagtagttgggactacatgtgtgtccagctaattagtccaccatgcccagctaattttttatttctaaaaacaaataaatttttatttgagaccagcctgtataacacagtgagttcttgtctctataagaaataaaaggtatacatttgcataataatagctaccttttgtcaagtatctattaatacgtatttgcagatgagtcactggaaggtaactagggttagatgaggtcatgagggtgggccttcaatatggaattagtgaccttaaaagaagagatattggctgggtgccatggctaatacctgtaatgccaactctttgggaggccgaggccggtggatcacttgaggccaggagtttgagaccagcctggccaatatagcaaaaccgtgtctctactaaaaatacagaaaattagccaggtgtggtgcaaacgcctgtaatcactgctacttgggaggctaaggaatgagaatcacttgaacccgggaggcagaggttgcagtgagccgagatcgcgccactgcactccagcctgggccacagagcgagactccatctcaaaaaaaaaacaagaagagaatttgcattctccccctactgccatatgaaaacagatggccatctgcaaaccagaaaaagatctctcaccaaaactcatcccacactggcactgtgatcacggacttccagcttccagaactataagaaaacaagtttctcttgtttaagccactcagtctatggtattttgttatggcagcccaagctgactaatacattacatgccagcactttgtcagggacttcaaatgcactacctcactcaatcctcaaaacccatctgcaaggtagatattttcaatttgtcataatggaaaaactgagacttacagaagttgggtatcttgcccaaagtcacacaaaatagggtagaattgacataaaaagctagtactaatttcaagtgtatacaaacactcgtgtacgcacacacatgcacacacatagcatttatgacacgattttgacaactcatgaattttggttgtacaggttatcatattgctattctttcgagttttctatatacttgaaattcttcgacataagatattgggaaatataatacctcaatgtaaaatacagcacccaaatgtctgtacagctgaggcctccttatgttccagccccaccagcctctcccgtcgatgtccgtgttgctctccacccaagcatcttgctgttgcctcactcacacctccccagacacctactttcaagtggagcataaaacggaccctccaaatactcaaacttggacccctgaaacctcagatcactaaccgccaatccctgtcctcgccgaccacatcctgacggccccctccatcggtggctctcccaggcctctctctctgtggcagggagcacgatgaggagaggatatttcacgagaaacgagagaatggtctctagtttcttcctcaatccacagctctaaacactgatgccggccctaaaagccctcaacaaccccgaagcggccttaaacggcaaccccagatggtactcatcagaaaccaatcccaagtcacggaattcccacagcgctgcgggattcctaagggctttaggcagagtcaaatgtaatctcacacaggagtcccgtgaatttactccctggaaggcaaagcttccatacgtcatttcctcttctgctcactgggctggatggccaggctttccagctattatacaaactcagtagcactttggaaggccaggatccatctacagacgcggatcccggtcccaccaggaatgatcgctcagcaatatggtcgcgcccaagccctgacatgctgttggaagccaccatcttggaagacgcagtacagactgcgagacagccattctaggcgaccggattccgctgaccaggccgaaaaggagtaaatctaactgatcctttctaatcttctaaagacctctcatcctgtacttccaccttctttcctgtcagcgtagggcatgcttagtaggatttcggcactttcaactagtcttccgacctgaccaatcagaacacaccgaaacagaaaatggctgcgcccacgctgcctcgttcttctaaaccacacgaaaggtgaggccgtattgaaaagcctgggtccctaggggaaagaagggagggagaattaggaagcttgtacagctaagacgcggaagacgctgggaatatacccaaaggaaatgaaatcactatgtggaagaggtatctgtactcccacatttactgaagcattattcacaatacccaagatatggaatctttctccatacgactgagaaagatggagattaggagacctagaactggatctggacgaacagaggtggtatgggaagagctctctggatgtgtggtttgtggggagagatggtgagggcttaagaactaatgtaaagatgcctgtggagcagacacgggcaaccacaatccaggccacaagaaaagcatttgtagctcacagggatcctgtgtatcttgaagagcacaacccacccagacatttgtcaatactgtgatgcaggagtcaacttccttttttccctggctagataattatcccaacaacattatttaaagttgatctcttccccaatttgctaatattttgtaaggagttgtacatctaagttcatgggatatttggtctgtaattatcttttattttaataatgcctctgtctagttttggtgtcaagattatattgcctttagataatgagctggaaaaaaatcatctttttgatgtatgtagttctaaaccatttttttgttttaatattccattgtatgaatctgttttctgcactgacacattcaacacaattgccaagctgttacccccttttaaaatatgtgcacattttctgtctcttttattatataaaaacttgaactatttccacagtttggggaaggaaactatacacaggtctttctgtgtcattacctactcttctccaatggagaaagggtaagtttaacaaaataggttgcgcatacaaaacaggttgtgcatggatggtttataacacttcctttttctatgttctttgtgtttgggttaacctgtctgcaggatgaagatttgctcttcagaatacatttgctatgttctgaatgtgtcccctaaaattcatgtgttgagaccttaattcccagtgcaatggtgttgggaagtgaggcttaatggaaggcgtttcgttcatgagaattctactttcataccacttgtaaaaggacttacaggagtaggttcacccccttctgccttttgccatgtgaggacacagcaagaaatcttcaccagatgtcagcaccttgatcttagactccctgcccactacagaactgtgagcaactacatttctgttcttcataaattatccagtctcaagcattttgttatagcagtacaaataaagacaacgctgttaaggaaacgatactggaaccctcatacactgttagtaacattcaaaaatggtaccacttcttcgaaaaagtttggccactttttatgttaaacaagcaatctaactattaagcatttacccaaaagaaatgagaagttattcaaaatagtgaaaaacccagatgcctatcaactggtgcagataaacctattccagtttacttatacaatggaatactattcgtcaacaaaagaacaaactactgacatatacagcaacatgaatgaagttccattttattatgctaagtgtaaaaaggtagactcaaaatgttatgtgctgtatcattcttttaataacactatggaaaagacaaaattagacagagaactgatttgttctctgttctggggatggggagagaagggttgactaaaatggacagaaggagggatttttgggcggtggtggaacttatgaagtaaagcactaatcttctccaaagagaggtttggcccttgctctcaactcctgggagatgacctctaagcctctgaaatttcctgcttgggaagagtatctttgtttacctggttgccttgggccatgccagatatgctaacaatatgttttatgatgggggcccttaggccatgcggtatgaactccacctgtgcagactatggtcacccatgtggatagtcaatcacgtctatgtgattgaacccaagtaaaatatctggacaccaaggtttgggcaaacttcccttattggcattattctgcatattgtcgcaaattgtttctgaaagaaataggtgctgcctgcatgatttctctgaaagaagacaactgggagctctgtgcttggtgtccactggaccctaccctatgcagttcatccctctactgactttgttctgtagcctcctgctgtaatatactgtacctgtgggtataatgccttttctgagtcttgtgagtaaattattaaacctgagggtagtgtttaaactttgaagttggtgtcagaaatgagagtaatcatgggtatccccaaatttacagttggtattattataaaaagtgatattggggaacactgaacttgcagctggtgtcagaagtgaagatggtcttggggactcccaaattacaaaactgttttgcaccataatcatggtggtaacatgattctatttgtcaaaagtcatagaactgtagaccaaatcagtgagcattaccatatgtaaactagtaaacaaataaaaaatttaaagatacaaaacattgtgtatagtacggtgtagttagtaagttgaaggtgatttttacttttgtttaggataagcatataattttgtgataaaaataagagatcaccatttaaaattatggaaagttctcaaatctatactcaaattcatataagatttaggatatacatttagaagaaagttaaatcagaaatggcataattacaatctttataaggtatcagaaatgaggataaatatttgaaaaatagctaccattggtcaaataccaattataagccagtcattttgccaggcatttcagataccccatcttattacttcttcaaaacaaacttgacaagtagatatcatttttcttttcctaatggaaaagctgaaacttgtaagagtctgtgtaccttgccaaagttcacacagccaatgagtagcagaaatagattaaaaattaatcttactttcaaatagctcagtaggaaaaaaagtacagatacacacatacaaatatacattaagtatttataaaacagtgtaaataattgttgaatatgtaagtggtgggttactattctttcaactttcccatacgttgaaaattcatattgcacccaaacttctctcctgagtcctaactactaagctcatcagccatctcctagcactgacacccataatgcccccatatccccacacctcacatttgctcctgttcacaactccccagacaccttatttcacacagaccctaacacagactcttcaactcctcaaacccaaaatacagacagaagccccagatgaccaagccagcagcctatgctctcaaagaccattccctgaaagctagtgggtctcccaatgccaagatctggagccgccctgtcactgccccaggaaacaacccttacgtctgtcattccttttccacccacaaggtattcttgtaaacacaatgatgtctttaggacattcgccccagacactttagaagctgcctttaaccaaccccaatgaataccctcacgcatcacctgccacatccccaagtcacgaatccctacagtggcgcattccagcagttcacagaaactgaaactttgccttaacttctacagtgacctgctgccatgaaagtataaggcttcctacactgcacatccgcttccacccactggcctggctgtcctgcctctagggctattgcgcagactcagtagaaactggaacgaccaggagtcccagattctgatgtctaaagcctttagcttcctgctctttggaaagctcatttcaatcaagtctgcaggaggtagccatcttgaaagaagtgccaccagacagcgtgctggccattcttttgggctaatgggctgcctctgagaggaaagaaacaattgcaacccaccttttctgtccttttccaagacacgtcagcacgagcatttacacctgtccaaaagttgcaaggagtgtggctcatgctcaatagcatttccgtgatcccacctatctgtcatgaacctccagacagcgaaaaccaatcaccaggtcaaacctaaactgaagatgtctttttgccctgttgaaatcttgtccattttggaggaattttgaggtttatagagcaaagaatacattccctcaccgaggaagaagggaacagacagggcagattctaggtctacctctaacagaggtaagctagagaagtgaaactggctgagggaaagtgctcctggctttctctgtgtagagatcttgcccatagaaggtgataggtgggatgtttatgaggaatggataaataggacttctggaatgctccattgcttgatctgagtggtattacacagttgtccacatataggtgttcccatcacatgttaaaatgtcatgtgtgtgtaattgtgtttaatatacttttgtaatgatatgaatgttttaataattgtatatgccctgtctttacatggctagctgtcaggtagggtgaatggctctttaaaagacagttttcttttctttttttttttctttgagacagggtttcactcccattgcccaggctggagtgcagtggcacaatcttggctcactgcaacctccgcctctgccttcgggctcaagcaattctcccgcctcagcctccagagtagcagggatgacaggcacaggccgccccacccagctaatttttgtattttctgtaaagacaaggtttcaccatgttgcccagactggtctcgaactcctgagctcaaatgatctgcctgttttggcttcccaaagtgctgggattacaggcatgagccaggtgatgggccctgaccccaaagacagttttcttacttcctactccttactccctttctctaactcaacaccactgggtcttcagtggtcagctcagcaattacagatacttcttagaacccactatctcaaacttcccaatagggacaacaagttttggccagcctcaagtaaaaagtgagccaggagccagtaatctcatgcaaaaagggcactaccctaagatttaacattttttctctttctcttttacctgctggatcttgggtgaactgcgttgtattggtctttttacagatgcattagaggattttggtcaattggaccaatctagaggataacggctgttcagcttcaagaacaggtaactgtacgggagtctatgtagtagagcctggttctgaacctggccatatgatctttaaagataatgaaggctctgttgctaccttctatagtatccccagatttgtgagcttcttggcttccttgaaactttcattgaaaataagtttctctttttcagcttgctagtcttcagtgtgtaagcccccttctttcttaaataccacacccctaaaggattgacatcgtgaaggtgttgtgctttgtaggacaatacattattataagctccaagttgaggtatttgggagtgaagggttatgatgtctgctatttaccttcaaatagttcagtcgaaagaagcaaactggatagaagagcgagatagattataggtagaagataaagcaaatatggcaaaaattaacatttattgaatctatgtgatgtatgtaagggtctctgctatactattctttaagtttttctatatgtctgaaaatttttataataaaaaccttgagaaaaactaccagtgactgattctggattgtatgtaattgattctttggttgcttgttttctgtgtagcagaaaatccacgaataaagtagaggttctgtctatcatatatcattggcataaatatcctcagtgctcatctgataataaccattctgcacccatctgggaaggaccaggtttctgtttagtttaccaggatgaaagcctgtggagaaggtaatgaattgatgctatttggattttttttttttgagacaggatctcactcttgtcactgcagatggggtgcagtgccacgatcatggctcactgcagccttgacctcctgagctcaggcaatcctcctgcctctgcctcctgagtagctgggactacaggaatgcaccaccatgcccagctaaattttttttttttttttttttagagatggggtctcgctatgttgcccatgcttctcctgaactcctggactcaagcaatcctccaatctcagcttcccaaagtactgggtttacaagtgagagccactgtgcccagcctatttggaatttattgaccttctcagatggacggaataattttcatcaaatttgggaagctttggccattatttcttcaaatattctatctgttgcttatcccctctatttactttctgagactttcattacatatgtgttggtgtgctggaaagtataccatatgtttctaagagtctgttcactttatgtttttcactttttttctgtttcacttcttcatgttcctcagactggataatttccattgacctagcttcatatttgcttattctgtcttctgccacctcaaatctgctgctgagacctgttctctttgttgctacttcatagttctttatacatggtttacttcagttccttgaacatagttaacatagctgacttttaatctttgcatattaagtctgacatatgagcctcctcaggggtagtttcagttgacaacctcatttcctgaatatggactatacttttctgattgtgtgtcacaaatttttgttgaatatagaaattttagatcatataaagttgttactttggaaatcagattccctctctccccagggtttattgttgcgattgttgttgcagtttgttcagtggcattcctggagtaatttatgtattccctgcagtgtgcagtcacttgaagtcttttcttagttagctaatgattaatcaagatttccttcatttctctgagcaagttttccactctttgctgagggtgctgtgtgtgtgtgtgtgtgtgtgtgtgtgtgtgtgtgtgtgtctacttcaatgctcaagcagtttgtaagtctactttagccttctcttccttcttctcaagggcttcaagatcagctagaagtgaactactggtaccctcaggtatctcatgggcatgcacacatccctgtgtatgtgttgggccttctagatcctcaggaatatgtcagagtatttaagagttccctattaacatcttgttcttcagatgtccgtttaacaatttttcagagctcttgtttgctccctaacggtactgcaggcttaggctactacaaagttaaacaattgaagctgatcgtttttgaccagtgccctagtatcgcacttttccttcaaagtgagctttgagtcaggtgagagaatgagttaggacaaagaatggaaccacatcatggagctgtaagacaagatatataatgacattgctctgaggatgaggctttttgaggatttccaagcttatttgtctcctctgatacaagggtggtggttgaaggctgatggtcttcatggctactgtggttctgaggctgctgttttccaacggtaatgcagatctggggaaagggatatagaagtaggccaaattaaaattccacataccccactatttttaatgaggttcaaaatttttttcttgaaaagaaaatgctgttcaaaatattgtaagcctttggttattttccaaaattgactgtgatgatgtttatgttgttttaatgaaaggatggatacgcagaggccttgtctctgctattctggacatcatgccttatcacataatttattttttgcacagtaatctctgggataaaaatttattaactttacaagtaaataccctaagtcttctaatgattaaatggtttaccatgggttatacagttgatacacaaagccattactgtttatcaatatataatactgcaccaatttaataattgtgctaatgaactgttaaaaattcgaatatgtccccagattatttctacccaacctcacctccatgcttccatcaagtatctcaaagaaaaaatacagagaacatcaggataatgctaacagacagttttgtgtttatttggttgtatgcctgccttctgagtaaagagtaaagcctctacatcgctaagtcaatgtcatacaaatcctttaattatccgtattttgggtgtatgtctgtcatattctagacatccacatacccttgctttcttaagtgaataaccagattctctgaagaagagacactgttgtgaacaggaccatcagtaattttggattttttttcaccatttaagacgagaaacttggtgctcggggaccttgaacatcaagatcggggggctgagggagggataatatactgcatgaaaggtggtagtatattgcagccagaggcttgattggaaaagaacagcattatgaatgagcaggatagaactgataaagtaaaacgaaatgaaagtacttcctagaagcagcatgatttgaatggcttttgcctcaggggagaatctgtaggagctgctgagggtgtgaatgcgcctcactctaccatgtagacaccagctccaaccatgagtccatgaagacaacatctgggaaagtcaagagaaatgtgtattttgtgtaatctcagcactttgggaggccgaggcaggcggaacatgaggtcaagagatcgagactatcctggccaacatggtgaaaccccatctctactaaaaatacaaaaattatctgggtgtgatggcgcacgcctgtagtcccagctgttcaggaggctgaggcaggagaatcgcttgaacccgggaggcggaggctgcagtgaaccgatatcgtgccaccgcatttcagcctggcgacaaagcgagactccatcaaaaaagaaaagaaaggaaggaaaagaaaaggagaaaggagagaaagaaagagagaaagaaagaaggaaggaaagaaagaaagaaagaaagaaagaaagaaagaaagaaagaaagaaagaaagaaagaaagaaaagaaaaaacaaagaaaggaaggagaagaaatgtgtattttgcagtagatgtttcaggatttttagaagagcatagaccacaatttcatatcttggtagaattggggatatgccgaagggcctctacatgtttaagaacaaagatttttattgtaggttgaagaaccaatacagaaagcaggagaaaccgatgttcttcaaagctctgtctttgaacctcatccacccaccagccttcgggtgggtgattgcctgagaactgctcaagtggcaagtgactgtagctttcaggctgctcaccagaaatatacagatacatatatatctgtacacatacacacacacacacgcacacacacaaaactctaagaacctattatctcatgtgctgctttcaaatctaagattattattttaaaattttttgtagagatggagtctcgttacgttgcccaggctggtctcaaactcctgggctcaagggatcctccaaaggatccacctgtaatcccaaagtgctgggattacaggtgcgggccattgtgtctggcctgcttttagtctttgagctttacagggccctgaaggcctatctttgaattcccttactctcaccagatatgctcccactgcacaggaaaggctcccacccagctaactccccaatcagctgaactagctgcacccaacatggtcctcaatctatattcagcccatggaattatacaaagcaattgcattcttccacagaaaccatgggcacgttaccctctcattatataaagcctacttcccacaatctccgtgcttgttcactctattcctgagtgcaatacctatatgcaatgaccatttctctcaggctgtatctgtgactaataaactgctgtcaatttcatctagccagtgtcaggtgttgtgttcagccattccatactacttagggtagggagtccctccctcatgcaccagggtgaataggaggttgtcagaacatatgacacacacaaacacacacagaaaaatgttgcaatggtcaaatccagattagtgtttagtactccttaaacatctttatgtctgaagattttcataataaaatggtgaagaaaagatttcttgacaactgtcaaacaaaatggggaaggggcaaaaatctagagaaaaaaataagcaagattttgctggtacatttttacagaattccttgcaaaacaataggtttcactgataaccaaaataagtcagttatttcacatggaggtaaaaaaaaaccttgctttttaataactagaatacccactagaagttttatagaagattcagtcaagtaagtctcattttgttaaaaaaaagtccatatttgaagtgccagagttcatgcaatatttttctttttaaatatatttttcttcatgtaaaaattcaaatattaacaattttagagtgtacaattcagtgaagtttagcacattcacaatattatgcaaccaccatctctatctagttcaaaaacattttcatcattctaaaagaaaaccccatacatactacgcagatagattgcattctcccttcccctctagtgcccaataaccactaatttgctttatttctctatagatttacctattcagagtatttgatataaatgaaagtataaaatgtggaatttgcatttggcttctttcactcagtatgttttttggggctcattcatgcaacatgtcatcagtacttcattcatttgtataactgaccatttatgtattcatgtgtacatgcatgtagcacattttatttattcatcctttgataggcatttgagttttttcaaccaaatgctattttggctattgtgaacagtgctataaacattcatggacaaatatttggttgagtacctgttttcaattctcatgggtattttacttaggaatggaattcctgggtcatatggtaagtctggatttaactttttgaggaaccaccaaaggaatggcatattatcataacaaatcaaaagtttcggtgtgacacaaacttgaaatatatagccataaactcacctcatataacctcacacttttttcttccattactctaatgtgttgctggtttttaaatattttaggtaaatcttttataatctttggatgtttcagagttataaggctctagaaaaatgtaaacttctacttgtgatggatcatcacagtgggcaaaaatactacaaatgacagcaaaaataaggaattcacacttacgtggtataatcctttagactccttaataatgagtcaaatatgtattacaagacattttgattcataagaaaaaaacattttatttgcactacattgaattattcaacattttgtcttatgttgagaatttctttaaccctgaaaattgtttcttcgtgtaattccaagtaaacaatgaagtttataaatatataaagtacatgtcacatagtacagtccacaacacaacccctaagatcctttgtcactattcgactaatccttattatattcttatttttcatatattcaaaaggaatatttgacaatgaaatgtctaatatttatagaatattctctggaatcctttctataataattatgcaaaaccattataaaattatatatacaggcaagggtaattactcaaatctaaagtgccatcacacatttaaaaagccctgacaattactatgacattccagatcataagatgcttcacaatttaagacatggtaggatgtgaagaagtgaatccatgaaataaaaaataacttatcactgatgcttttaccactttcactgcattcataaaatctctgtatggagcaaattctgctcctatatttaaaagcttgtgatgtttaatgctatctaatcctccacagaaattatttcctgtgaccagaaccattgcttttaggtaaatgtatgactctgctgaagcagaatagatatggctccattaggattttatacctgcattgaacctaaatattattgccttcgagaataggatctttctgataactgagttagggggcaattcagctctgaattttaaataaagaattttagacaatcactgcaattctttcctgctatgcaatgggttttgtggccaatggccaagtttaactctatcgttttcccttctgatttaagtatctgatgtatatgtcactttcaaaagctttccacattccgtttcagaaggacctatctaccacatgagtttgctgatataattagtgacctttggtatctacatgaaggctttaccacatttactatattaataggggtttcctcttgtatgagtttgctataacaagaaagataaacattaactgggaagactttatcacaatcacattcactgtatctatgagatttctctcgtaaacaagatattcaaagagttttgactttcagattttaatttttacctgcaatgaggtgtgattcttcttagctttcctgcattccctccatctgtagggtccttctcctgaatgaataccctaatgtgtaacaaatataatttgagaatgatttatcattttcattacatccactggtgctgcctactaaatggaaagcttctagttttctaataaacttttttgacaatcactgcactcataattgactctctctttttttttttttttttttttttgagacagagtctcactctgtcacccaggctggagtacactggtgcaatctcggcttactgcaacctccacctcctaggttcaagagattctcctgcctcagcctcctgagtagttaggattacaggtgtgcacaccacacctggctatttgtttttttttttttttgtatttttagtagagacagggtttcatcatgttggccaggctggtctcgaactcccaacctcaagtgatctgcctgcttcagcctcccaaagtgctgagataacaggcatgggccaatgcgcctggccaatgattcttcttgtgagatctctacggtaaacgagggatatcttcaaaaaagaaggcttaaaatattcattgcatctataaggtttctctcccacaagagttccaaaagggcccattacaatcatagtattcatggaacttctattgtgtctgagctgatgtgactaatcaaaaaagctctctcatattccaagtcactgcatggactttcttccttcctgctggggtttctgatgattagtaatagctgatttctgagtaaagctttttgacattcactgcatctatagggcctctttcctgtgtgagttctctggtgaccaatgagagtttacaaagtagcgaatgctttcttacaatcactgcatttatatggtttctctcctgtatgaattctctaatgtacagtgagacaggatttaactatgatggctttattacacatgctacatttgaggagtttctcacctgtataggttctctgttatataatgagagttgacttacaggacaaaaccttcccacatccactgtatccataagatttcattcttgcatggcaagtttttcgatgcttactgagacctgtcttttgggtgaaagcttgttgaccttcattgcatcatagggtctctctcctgtgtgaattggctgatgagtcatgagatataccttactggagaaggccctatcacagtctgagcattcatatgatttatttcctatatgagttctctgatatacaatgagatttccctttgatgtgaaggctttatcacatacattgcatttgaagggtttctcacctgtatgggttctctgatgtataacaaagttttttttggaggataaaaccttcccacattcactgcattcatgggatttccttactgcatgatgagttttcttatgattgttgagatccaacttccagatgaaagcttcttgacattcactgcatccatagggtctttcttctgtatgaattcactgatgcttcataagctgagcctttttcaagaaggctttctcataatccaagcaagcatatggtttctctcctgtgtgagttctctgatgtatagttagctgtgttctaaccatgaaggctttatgatagactttgcacctgaaaggtctctctcctgaatgagttctgagatgcaaaatgaggttcgacttccaaggaaaagctttcccacatttactgcatccatagaattttccttttctatgaagaactttctgaggataactgagctcagatctggtcttcaaagctgtttgacattgaatgcattaatagggtatctctcctgtgtgaattcactgatgaatcatgaataaagccttttttgagaaggctttttcacaatctgagcaagcatatggtttctctcctgtgtgagctctctgatgtacagtgagatgtgtcctaaccacaaagcctttatcacatactttgcaaatgaacggtctctctcctgaatgatttctttgacataaaatgagttctgacttccaagggaaaacttctccacatttgctgcatgtacagactttcccttctctatgatgagttttctgatgatacacaagccctgaatttgtaatgaaggctttttgacattgattgcatcagtagggtctcactcctgtttgagtttgctgatgagcaatgagctttaactcactgggaagggctctcctaaaatcatgagattcctgggatttgtttcctgcatgagttctctgaggcatggtcatgagtagtttacaagtattcactgcacattcactgcatccatatgatttctttccaaaaagaattggttataattagcaagctctgacttctggatgttatgaaagctagtgtacgcacaacagagtaagtgagataacaagaagaggtccagaaaaaggcttcttttcccatttaccataaaaagatattagtaagatggttaaatttgagtaagctctgtattttaaataataatactatatcaatgtcaatattctgattttgatcacagtattctgattatgcaaaagaatgctcttcttcctatgaaatacacacttgggttttagggtagagttcagaaaaaccatatgtacctgtgtgtggtgtgtgtgtatagataaaataaagcaaattggtaaaatcatattttggggaaatttgcaaaaagaatgtgcaagaattttgtgtatcattttggaacatctcattaaatctagaccatttggagacaagcattttcaaaaggagaaaataaaaataaagatattgatgaaaacatacatagggacactaagtataatggcctgaatgtaaaagagataaacagtgtaatattcacccaatgccattctgcacaggactcagattcttgatctaggtgctggttgcacagtgtgctgactagaaagttacctagctgtataattacattatatgtatgttataccaaaacatttttcattaataagtaaacaaaaacgtttaggccgaaatcagggaatgctcccttgtaggaggatcctgaaaagaatttggatcttgtgctaacagtaacaggatgccattaccaatgatagtgggagcaggatgacatgtcctgatttccaatttaaaagcaacatcctgtgtgtatgtttatcagtaattaacactgaccatgtcttaaatattatggcatgaatatttttaggcttgcaccctgtgaatgagtacagatttgctacatcatatagcattttttagaccataatttagatctttccatcctccaactaagatttacctttttatatgaagctttaattactttccgcaacacttttgtcaaaatctgaagtcttttaagaaccaagatgtttctgatgtttattttaatgttcagggattttggaggtgaggggctagaaacactgactcctgcccctgactcccgcccctgactcccgcatttattttcataaatgaaaatagtaaaataaattcattaagggtattatgtggagaatagaaacaagagtaaaggactgagagtatattagagaaaactatcataattttggcaagagataatggacatcgaagcttgagtgaaaataactgttagagaaaggagtagaggacctcgagatataaggagaaagtaaagtctaaacttgctaaatggactggatttgtgggatgagtgaaacggtgaagcaaggatgacttgaagtttgagttagctattagatctccaagcaattcccaggcaaatgtaggaggataaggaaatatctagcctgtagagagaaatctgtgagtcatcaacatataaatagcattgttaagtccatgaaatcgaagaggtcacactgggaacaaagaaaagaaattaccaatgatgaagcacccttacgccctccaactctgaaggctttgggagaaggagatgcccagagaatggaaaaagtccatccatcacgctcaaacaataagtacccagaaaagaggccaacttaagtcttaggaaccaacatctgtgggaagcaagataaaatgaagtcttctcagctcttcacataaatgtaagtgctgtcactctgtttcagattcattcttctttaattctgcatgcaacagtcaatgaactttcccaaagattttttttttcttgagacggagtttcgctcttgtcacccaggctggagtgcaatggcgcaatctcagctcactgcaaccttcgcctctagggttcaagtgattctccaaccgcacctctggagtagctgggattacagggcactcgccaccatgcccagctaatttttgtatttttagtagagacagggtttcgccatgttggccaggctggtcttgaacttctgacctcaggtgatccacccacctcggcctcccaaagtgctgggattacacacgtgagccaccatgcccgcgccttcccaaagatttctaacaccatatatacaggaacaccactgtggtgagcactcccaccttctaggttgctttgatacattctcatatgattcactcaggtctgtaggaaatacaaaaatcaggccaaatatccttaccccaggataaaaggcagtgctgtgatgatgtgtcgattgtgagaatctaagtcaatataaagagagaaaaaggcacattttctttgaaacgccaaacaaaagagagcctcatcaatgatctaggtatctgtagtcaccttccaagtctttgccctgttaaacacatttggaaggggtccaaccctcatggtcagctcctttactttccaggtctcccatcttgttggttctcactcacctgaaatgcactgacctcacattttatcctctattctccatgtttgaaattaaatatcactggctgggtgcggtggctcacacttgtaatcccagcactttgggaggctgaggcgggcagatcatgaggtcaggagattgggaccatcctgaccaacatggtaaaaccccagctctactaaaaatacaaaacttagctgggtgtggtggcacacgcatgtaatcccagctactcagaaggctgaggcaggagaattgcttgaactcgggaggcagagattgcagtgagctgagatggcgccactgcactccagcctggcgacagagcaagactccatctaaaaaaaaaaaaaaattaaagatatctggtttggtagcttaagagcctgtttatgggaaatgacaaagacttgaacacttataattgggcttgatgggaggtgtctatgaacagcacagaaatgtttctggaactgacacactttcagctcggcagattcaacatctactatgacagaggctgcagtgagccaagattgcaccactgcactccaacctgggtgacagagcaagacctgtctcaaataaaaattaaaaataaaaaaaagtaaaataaatacataaggaaccacccccagctgacagccagcaaagaaacaaatctcagaattagtctgccaataccctggataagcttggaagtggattcttcccagattcttccaataagagccctgttggcccacaccttgacttcagtctttgaaacccagatcaaagaaaccagtcaagccaatccagacttctgacctaaagaactgtgagacaataaatttgtgttgtttcaagctgctaaacgtttgtgagaatctgttttggcatcaacagaaaattaatacattattgacaccagaaacatcagaaacaggccagttgtggtggctcatgcctataattccagcactttgggaggctgagatgggcaaatcacctgaggtcaggagtttgagaccaacctggccaaaatggtgaaatcccatctctactaaaaatacaaaaattagccaggcgtggtgacacacaccttaatcccagctactcaggaggctggggcaagagaatcactggaacccaagaggcagaggttgcagtgagccatgatcgtgccactgaacctgtgtgacagagtgagataagaagaaagaaagagagagagagagaaaaggaagaaggaaagaaagaagaaagaaaagaaagaatcagaaacaacttaagtacatcatacattcttacatatttattcacctgtattcacacttaaggcactctgtatgaagctacatttcctcattccacctttacctgaatcttgattttatggtttctgtttagttttccttaaatttttaaattacaaatgtatgtatttccatttaatagttatttgtcttaagccttgcaaagtcattggaaagaaaggcaaaagaaagaagcaaaacctcaccggggcttttatcgtttttttcttcggttcttaggaaaaggatatcatttctaaggtatgatctagatattgtcttttctgattctgaacatcggacaaaagatctcttttcaagagaaaagaagacatgtcagagagaggcccagcttttagaattgtgacaattactcaatttccctcccttaatgaaggacaactttttaaaaacacaaagctggccaggcgcggtggctcacacctgtaatcccagcactttgggaggctgaggtgggcggatcacaaggtcaggagttcgagaccagactggccaacatgatgaaaccccgtctctactaaaaatacaaaaaaaaaaaaaaaaattagccgggtgtggtggcaggcacctgtaatcccagctactcaggaagctgaggcaggacaatcacttgaaaccggaaggtggaggttgcagtgacccacgattacgccactgcactccagcctgggcaaaagagcgaaactccatctcaaataaacaaaaaacaaaaacaagcaaacaaacaaaaagaacaaagctagggttggaaaaagccctcagaggtcagactaatcagcaccaatgaggaatttctagtcctctacccccacccctaaatacagatacagaaaaaggcaatgagaacctggaatgtcttctcccttgcatgggatcagagccaggcaagttctggtgggagagctgacactggatttctactctgaggtctggcaggttctagtatttacagacccaagttctaaactgggaatcaagacaaagtggatggaatctgtaaatctgtgcaccagcagttgtaggtttttaagtgtgtcaaatttctttatacataaatcatcttcccacttgtaatagaagttctttttaaaagttgctgacttagtcctcaaagcactgcattgtagacactgttctagaagctttctgttaacagtgatgcagttgttaataggccagttccggacactccataggacacagacacctacacacctaaaaaagtttcatctggggtgtaaaaggagaaagtcagcagagtaaggttaggtaagacccatgccctgagtcccctccccagcctccaacatgggatccatctggcccatgagagcaggaagaacaagggcaaacatgtcccacacaacaatgggattctgtaggactgcttcccacctcagccacacagcagggcagactcaccaagaaccgactgggtctgacccaccaaagactgccccagccaaagcagaactgccagatgagctcagaattaatatgcccaaggccaattccctcataatgttgcctacagaagccccagcaagcaccggctaaggttctgactactaccgtcttcaactgccttgaacacccagatagaattcactcatgtgtgtgggggaaagaaagatagatcagactgctactgtgtctatgtagaaaaaggaagacataagaaactctattttgatctgtactaagagaaattattctgccttgagatgctgttaatctgtaaccctagcctcaaccctgtgctcgcagaaacatgtgctgtgttgactcaaggtttactagatttagggctgtgcaggatgtgctttgttaaaatgtgtttgcaggcagtatgcttggtaaaagtcatcaccattctccagtctcgagtacccagggacacaatgcactgcggaaggccgcagggacctctgcccaagaaagcctgggtatcgtccaaggtttctccccactgagacagcctgagatatggcctcgtgggaagggaaagacctgaccgtccccaagcccgatacccataaagggtctgtgctgaggaggattagtgaaagaggaaggcctctttgcagttgagataagaggaaggcatctgtctcttgctcgtccctgggaatggaatgtcttggtgtgaaacccaatcgtacattctatttgctgagataggagaaaaccaccttatggctggatgtgagacatgctggcagcgatactgttctttactgcactgagatatttgtgtaaagtcaaacataaatctggcctatgtgcacatcgaggcacagcacctttccttaaacttatttatgacacagagtccttcgctcatgtttcctgctgaccctctccccaccattaccctatagtcctgccacatccccctctccgagatggtagagatagtgatcaacaaatgctgagggaactcagagaccagtgccggtgcgggtcctccatatgctgagcaccggtcccctggggccactgttctttctctactttgtctctgtgtcttatttcttatttcttttctcagtctctcgtcccccctgacgagaaacacccacaggtgtggacgggctggaccccttcaatgtggagaaaaatggccaaaggcagatgtgtgccagaaacccctacaggggctaaacagtcaagacacaccagccgctaactagaataagttgttaggcctcctaactgtacttcccataaacctcaactgcccagcacaggtgtctcaagcactgcccatggccaaactacacttcctaggaagctcagcagccctgttcaaaagcctcagttcccagagaaggcaaagaggggctaaacaccgggtagactacactgcacaaattcagctgagcttgcttctccctctcagggaacctggtgctgattgctggtaattgcctccttctggtccctccctgggaggattaacatcctaggggcattgggtccagtgcgtagactgagcttcatctgccccttgttcaggtggggggaacccatcagtaaattatagtttttataatccacttgattcatatgggacatttatagcagctatttctaacatccttttctgctataagtgtgccacttctgggtctctactgagttttcttcatgttatggggttatattttcctgcttctttgcacacctgggtaagtttgtattggatgccagacatggtcaattactgactggtagattgctttctatttctttattagtctctgtttggaaaattgctaacttacttggaaagtatggccttttcatggcttgcatgtatgctttgtgaggagagttcgaggcagcctttactgtagagcaaatctgagccacccacagaggcaatactccttacttaaggtccactgtgattctccaaatgttaggaggcgtttccactccagctggtggaaatgcttgtgtgtaatccaaggatttttctgcgtgttcatttcttcctgttcttcctccagcctagggggggtttctcacatacatatgctgattatgactcaaaaggcttgtgggggaaactctacagaactctcaattcttgagtgcagctcttctccaataatccaattcatgaatttgggccaccttgaattcctcaaaccctaaactctgtctcaattcagagagatggctgggatctgcttgggtttctcctcccaatcctgcagactggaaactttctccaggcactaagctggggcaatcataaggctcatctcattgtttcctttctgtcatggaaagctgtcctaagccctttacttctcaatgtctgatgaagttcattcatatattttgtgcatcttttttagatatttaaggcaggagattatatacattagacatttactgtaaaagaaaaagggactgtttgggttggctatgaaaaagttagtcaatatccaggtgcattatgtcatatgcattccgtactcataatgaagtatgttagtttcttttccccccttttttagagtcagagtcttattctgtcacccacgctgtagtgcagtggcatgatcatagctcactgcagtcactgcagcctagaactcctggactcaagcaatcatcttgcctcagcctcccaagtagctgggactataggcacacaccaccatgtccagctattattatttttttttttttttgtagaggtagtctcgctatgttgcccagggtggtctcaaacttgcgggctcaagtgatcttcctgccttggcctcccaaagtgctgagattacaggtgtgagccactgtgcctggccaggtaggttaatttatataatttcagaatagatacaaatttacgtttagcaacatttcaagcaccataaatctcatgttctttttggacatttaggagttattttccagtgctgatgtgattttaacatttcaagagcatctataatgctcacatataacaatcatagcataagattctctgattatagaataaaatcttaacatacttgcctcataataagatagggagattatcctggcttatctgggttttcacagtgtaatcacaagggtcctcaaacatggaagagggagacagaacactcaagtgtttgagtgatgtaagactgattggccattgctggttttgaaaggaggccccaaaccacagaatttgggcagcttctagaagctggaagggcaaagaaagacgctcccctagagcctccaaaaagaaaagcagccctgtcaacagcttgatgtagccccgtgagatgcatttggacttcagtcctccagaactgtaagataatgattttgtgttgttttaagccattaaatttgtgttagtttggtgcaacactcataaaaaactaacacaattttacttccatatttgttatattcataggttttcattacataatactattcctggggttcaagatttcattaaacacgtccctccaagactctcaagacataaaagtatgatacatgagttaatttggtgagttgccatcatttcttactttcaagagtttttcttttctacaaattctcccatattttacgaaaaatgttttccatatccattgcctctacagttgtctatgtttctttggcacacgaggcacaatttagcgctaaaagcaccatcacaatctttcataaatattcctgtaagaattcttttgataccaattgagatatcatctccaggtaaagacttcctcataacagctgcatttctacccaacatgatttcaatggtgtttaacaggtttgacttctcacagaaatgtcctccacaaccactgcctccacagtgtttcagccctaaatgagctctctgggatataatggctggaggattcctactaaagattttcccacctttctggtatcagaagatttattctgatacaatatctgtaagatacaagatataatttattactgatggggccacattcacttcatttgtgaggcttattctctgttcaaattcctgattaactacaaaggcttgatttcttggaaaaggttgttccacaatcactacatttctgcccactaggcgctcactcttgtttaacaatggcggggttcctgaggaaggcatttctataggtactgtgttcacagtcttttgctcttgtatgagttcgctcatgtataaggaggtatgactccttgaggaaggtttctccaccgtcagtgaatttatggctgtctctcttatgtgagttttctcatgtttaatgaggactgacatgtgggcaaaggctttgccacattctctgcatgaatatggtctctctccagtgtgagtacgctgatgctgaatgagcttcgacttgcttctaaaggctttttcacactcactacattcataaggtttctctcccgtatgaatcctctgatgtctggtcaggtctgacttaaaatagaaggttcttccacaatcactgcatttataaggcttatctcctgtgtgaagtctctggtgtgcagtgaggtatgccttctgagaaaaggctttcccacacacactgcacccatagagtttctctccagtatgtgatcgctgatgtctattgagccggcacttccggctgaaggcttttccgcatttgctgcatctgtagggtttctctcctgtatgggttctctgatggaccatgagctgtgactttctggagaaggcttttccacattcactacattcatggggcttctctcctgtgtgagttctctgatgctcagtgagctgaatcttcctcatgaatgttttcccacattcaccacatccatggggtttctctcctctttcagttctctgatgttgaataagctgtgctttcctggagaaggctctcccgcacacactgcattcatgtggtttccctcctgcacaaattttttgtaggtcattgagctgtgatttagggctgctgggtttaacacatctatggtatttaactccagtaagagttttgtcacgcttgatatggaggcatgatctcccatatccaccaaatgcatcagaatcttttcctgcatatcttctactctggattacaaaacctaaatgagatttcaaacttttacaatgcgagccaaacttattgtgtctttacattaaaggaacaatgctcttacataaaccaaacttatttccaagggcataactttgttgacatctttcaaaatgtttaagctcattttggttttctgggtaccactgcatatggtaaaccccccaaatttctcctaggaaaaagcacaatatgaacatccatgataattttttgtggaggtggcagaaggtgcaaaaatgccatggttttggctggcttttataagatctcagtctcagagtaatgtacctcacactctgtgaaaaaggatgatactataaaacagcaaaaggaaaatacagcaacttcagcaacaacaatggatactctataatgaatcaatacaacttgggctgcctcccaaatcggaccttgcaaatggagacagaatagaaacagaaacacattgcaactggaataaatcaaaaatagatggaggggatggatgtattcacccaacaaacactgaatagactggtatttgggatactacagtgactaatcattattctctctctccatgaacctgtcattcaggtaaagacagagaatcaacaggtatgcaaagacgtaagaaaattacagaatgtgaagaacagtacaaaggaagtggctcacatcatagggtaagaaaaagcaatgttatgcaaagaacaaaataaagaacattccaagaaaagggaacagccagtgtgaaaacccagaggcagaaaaaacttaggtgtgataaaaaaaaaaaaatgtaagagaagctggtttacccggaatatcctgagcttgagtgaagtagaaatacaaaagtttggcaaggctggcaggattaaaaacatgaagattttggaggaagactttgttagaaactggaatttatgctaagaacaatggcagtaagccaccaaacatttttttgccaagaaaacatgttctgaattgacagttccaaaacatgactgtcctatggagaatgaattgaaaagatgaaattatagaagggaatatgctggaggttatggcagaattcagatggcttgatcaggaataattacaatggagatggagaaatgtgaaaaaacaagaacataagtatggaggaggaaaagataggattcactcttagaacacatgttcccagcagaaaagcgaagaattgaggataactgctcagtatgtggcttaaaacacctatgtaggtgctggtgccatttaataaaatgagggtaaaagaagcctcataccaaccagtaaaacacacacacaaaacaatatatgaccattactaagttagtgcagcatagacacaaaggagataaaagtcagaaaagagggtggccaggcgcagtgcttcacgtctgtagtcccagcactttgggaggtcgaggtggatgggaggagttcaagaccagtctggccaacatgctgaaaccctgtctctactaaaaatacaaaaaaaaggattagctaggcgtggtggcaggtgcctgtaatctcacctactcgggaggctgaggcaggagaatcccttgaacctgggtggcagaggttgcagtgagccaagattgggccactgcactccaacctgggcaacaaaagcaaaactctgtcacaaaaaaaaaaaaaaaaaaaaagagagagctccaaatgtgccctggcatagtcaaaaactagttcttggaagtaaaacaagagccgacagcgaaagagggcagtatctggatgtaaaaatgcaacgtgatcaaatgcacagatgtcagtcctcatgttatttgacattatctgtagcattcaataaaatatatgtcttcctcctccttggaataattttgtcacttatttcatggacatcttctgactctcccaccacaaccctgatactttttctatgtggctgggttctcctcttttgaatctctgaatatatgtggacctcttctttcttcaagcaacactcactcctcatgtcttctcatcaagttccagtgctttgatggcccctgcccagaggggaatgaagccatcacatcaaatggaactcacagaaaaagagaagtcagtcaaacgtgcagcaatggaggcgataagaacctctactaccatggcctactgtgaagtgggacttcaagagtagagtgttcaaaacaataaaaattaacaggagcagctgagacattcagacgtagaacagagtaaaccgagaagactcaaggcaactccaaggtgaccaggcaccggagtgatgagcaatacagcagaacctaaatataatgcacagggagggaaaggattttccaggaggaaagagaatcacagtttctaaccctgaagctgagggaagaagaatttcacagaatactcgtccagggtgctggcaaaatatagaataagaaggcaggtgagattacagaaaaggagatatctgcatgaagctatttgtcagaagacacagctgaaatctttagtatatgtgagtatactacatgatggtagaaacaactgggagaaaggaggattctggtttcacatcctggaagaaggaaatattcggagagctgtcctggtggctggcgacacgcagcgggttagagtgcagatgagacgttagtagcagacatgctactttgcgagtctccagcaggggccagagagctcaggccctgagagtgaattaaacttctaccaggagaatcagcagaagataaaaaaaaaaaacagaagctggaaaggcggggagcagtgggtgagtaagtcgacagagatgccccaagagacatggtgtggaggcattgacgtgagctaaggtgaggtgattttcagtgaaggaaatcaggcctttccagaggggccgggatacacttttaagcgacagaagtgctaaaagtaatgcaatccagccaggcgcagtggctcatgcctgaaatcccagcactttgggaggccaaggtgggtggttcatgaggtcaggagtttgagaccagcctggccaatgtagtgaaaactcgtctctacaaaaaatacaaaaaaattagccgggcctggtggccggcacctgtaatcccagctactcgggaggctgaggcaggagaatcacttaaacctgggaggtggaggttgcagtgagccaagatcacatcactgcactccagcccagccacagtgcgagactccgtctcaaaaaaaaaaaaaaaaaggcaacataatccagatgggttacgaggggaatttcaaagcaagtaaggaaggggcaaaagtcaggagcaggctgggaagaatggaaccaggtaagaattcaaggtcttcgatgacatggactgaaatcagatccagaaaatagaagaaaggaagacattatcctttgagagccggctctattagggatggacacagatgcagaaaggctgattaggtttctgggccaccaactactgtgaagtcctctaaagaacactttaaaagcatcaacccttctccgaccagctgggatttgcatgccatttctccccattttcttagttttcactcacttacctggacagatttgactgtgggctgctccttctgctatccctgggggttctccttgctccaacttgaagagcgaatctggcttggtgcctcgataccctgtaaatgggagatcactgaacacttggcacgtgtgcttggggaatggatgaagatggagagggttatgtctcaggaaccacagcatttgcactttgataaagcaaaactctttcactcaggaaaagagcacaaccacttcgtgccagggaggaaaataacagtctgcgtgacacacccatacccattaggatggctactatcaaaaaaacaaacagacaaacaaaaacagaaaataacaattgttggcaaagatgtggagaaactgggaccctgtgtactcttggtgggaatgtaaaatggtactgacattgtggaaaactgttcctcaaaaaattaacaatggaatgaccatatcacccagcaattccacttctgggtatataccccaaagaatggaaagcagggtctcaaagagattatttgtacacccatattcatagcaacatgattcacaagcgctaaaacatggaagcaacccagtgttccttaacagataagtggataagcaaaaggtggtatatatatatacaaaagaatattattcagccttaaaaaggaaactctggcacatgctacaacatggataaaccttgagaacatcataataagtgaaataagccagacacaaaaagacagacactatataattccacttatacgaggtacttagagaagtcaaaatcctaaagacagaaagtgaatggtggtcaccaggagctggggagaagtgggggaatgagtagttgttgttttgtgggtacagagtttcagttttagaagacagaaggtagtgttggtggctgcataacactatgtgcgcgaatgcatttaacccactgaactgcacgcttatggttaagacggtaaattttatgttatatattttaccaccacaacaaaaaatctataacatataatactttagtctaaaccattaaatatttatgggaccgtacagtggtcaccaaataagaaagaaaaggtaagtgacggcaatgctgtccttacctattgatactaggttgatgtagttctccaacattacttccttgtacaagaccttctgagactggtccaaaaactgccactcctccctggtgaagcccacagccacatcttcgaatgacaatgacccctataataacaattccaatgcaatctgaggtggataacaatagatgatgcggagaagagggacggggacatgtcttgatccttttctccatgacaacgtatgcacaccatggctatttcacataccaaaggaccatggaattccaccaattctgcctaccctaaaagcacgaaggcagtactagcatagatatgaaacaacatgtaataagactgttcattattcctttgtttctcataatgaaaaacttaccaataatctaaatgtctatcaaaagcagacagggttaaattacagcacctccatgctataatatactgcaaaaatgttaaaatcaatgaggtagatgtatacatacccacatgattatcaatgatctccaaggcagtctcttaaatgcaaaaaattaagctcccaaataatatatgatctaagacatattttaaaaatgtaataatacggctgggcgtggtggctcacacctgtaatctcagtactttgggaggccgaggtgggcagatcacaaagtcgggagattaagactatcctggctaacacagtgaaaccccatctccactaaaaatacaaaaaattagctgggcatggtggtgggcacctgtagtcccagcgacttgggaggctaaggcaggagaatggcatgaacccgggaggcagagcttgcagggagccaagattgcgccactgcactgcagcctgggcgacagagcaagactccgtctcaagaggaaaaaaaaaaaaaaagtaataatatggctgggcatggtggctcacgcctgtaatcccagcactttgggaggctgaggcagggggctcatgaggtcaggagttcgagaccagcctggccaacatggtgaaacccccatctctactaaaaatacaaaaattagcagggtgtggtggcacgcacctgtaatcccagttactcaggaggctgaggcaggagaattgcttgagcccaggaggcagaggttgcagtgagccaagattgcgccactgcactccagctctgggcgacacagcaagactccaacttggggggagaaaaaaagtaataatatttataattacatatgtataagtatacacaagtatgtatacataaatgtacataaatatgaatatattctaccagatgtcaatcacagggaggaactagatagagacccaaactatgaacacttatttagtatcctttgggttgaagtttgggcagaaaaagggtgaaaggagatactgtcttttgatacaaatgcttctgtttgcttgaatctcttgcgtgcaaatgtagccatgtatcatttcagtaattaaacatagaaaaagcaaaacaagccgaactggtgctttgttttttgaacctggagttaagaaggtaagaaagaagcattgtcagtatctgcattccaagctgttaccaaagaatggagctgttaattgtctcctgctgtctcaataacaaaaatctggatgagagaattcttcttcagggaggatcattcaaaggtcaagcagcccattcattctactggatactccaggctttatcactgggcaaagtcagatgaccagaagcctctattttcaaggcacgctattttcgaagaattttgtccaatccagttttcctttggcattactccttagcttaccccactaaacaacaggaaaaagccatagaaaacatcccatgcctttattacaaggctgactttgaggataccgtcaaccacaaaagctctctgaaggaaagaagtttctcaagctctcacagcaatgacaaatttacctcccctgaagaactgccttgctctctcctcacagacattacaatcgtggcatttttcatgtgtttcctgttatttcagctgccaaaaaaaaggagacacagtttaaagcagagaaaacccacagggtcttaacagtcacttagctatgttccgacattaagaactttcacaaaccccctgatccatatatcttgtttcttaatttgccaggattttaagattccaacttaaacttattttcccacagatcctgatttttatcagcatacactatctcatttaaccagactgtcttttacaagcttccacagacccattgggaaacaaacgacaaaataggtaaaacaaacctcacctgggccttgcccatttcgttcaactcttaggggctagcaactctagtatgttctctctcttctgtctattctgggccttcccagaagtggtggtcaggtatcatctcaggtcaagctaccactggaaatgatgatcttccccagcctggaagctccttcttccattactgaaaatgtcttgttcctataggccagaacctgtggattcaagaccaaattcaatgataagaagacatgctcctaggatcacaagtctccaattgccatctggactcacattaacatcaggttccaatatttcatctgtctccttaacaccctggaagccattacatcatggggcagtgatccagaggaagatatggaatgtgcaagaggaatgcctttttttttggttatgtcagaaatagagtggatgtgaaacaggagaaagtaaacaaaaaccacctatggtcttgtccactgccaagttctcacatatatcagttttaggtaagacaatgaaggaagtggtaaagccagacatggtggcatgtgccctagagttccagctattgtagaggctgagatgggtggatctcacctgagctccagagttcaagaccagcctggacacatggcaagactctgtctctaagaataaaaacataaaagaagtggtggctcaagaaactgacttaaaatcaccaccggcagccacatgctcctaaatttttggtttattgcactgtcttactaatcatacaaaccataagcactgtcttactaaaccctcgatactactttataaggtactcattattatttccatcctaaacatgagtaagctgaggcttgctgagacaacgtgtgttgtgcaggttaacattcttcctcattagtagcatgggaacttgaatctacatctggggtctctcccttgtgatacttccctcctacaacagccttacagtgcaaatttgttctctttcctacccacttttagaactttacttcccagcactttacactgcggggtggccacatagtcacagctacacaaacaagggcctgtgatctcctaatgcaatattcagtgtggatgctcagcctgctccttccacacagacaggaaagcaaaggcggtcccatctttgccccagaagcagcagttcagagatcagtctccccaagaaccactctagaaactcacactctgagaacacccacactgtgagaacaacttgaattttgctgtcatcccagcaagtcattctcaagactctctagcaagcctgtatcctttacacccagagagctgatctccaagccattttctgacccactggtaaacgcactggtcaagatgcaaacctcctctaccttcaatcctgagaccgcttcatcccagccccagcccttcagtctagcctccctacaggaccagtccaaaaacagtggtacccaacccaaatgcagaaatccatatggatagctaagaggtagaaaaggccattacgcatgaatgggttggagctgagatctccagggttgaaaaatccaggatccaaccattcccagaagctcatggcaggctttccctcatacataatacatcagaattgcaccaaatactcacgcggagaacatggcaatgtaaccgagaagggcaatgataccaccctgactggtaaggataatctggatttcctactgaactgaggttcaggtcaaatgtccagaggacactacctaaattaaagaggaattttcttaagaaagggggcttggttgtcagattggcagccaacagtatccaataaaaaaaaaaaaaaaactagggtctgctgtgttggctcaggcctgtaattgcagcaattctggaggtgaaggcaggagaattccttgaggccaggagttcaaaaccagcctgggcaacataccaagaccttgtctctacaaaaaaaaattaaaaatttgccaggcatggtggtgcatgcatgtagtcccaggtacttaggacggtgaggcaggaggatcgcttgagcccaggagttccaggctgaattgagtttatgaccgcatcactgcaccccaacctgggcaacacagcaagatcctgtctcaaaaaaaacaaaaggcaaaaaaaaggcttccacttcaaataaaagttaggatgcttccaaaccattacaagccctcagccttatctgcttttgggaggaatgaagcagggaggaaggaaacaggtgatttctcccatatgatgtcctacctttggatatggctgactgctgtatcagggtatcattttgtgtgggctttttaaaaaaaatttttttttttttttttttgagaaggagtctcaatctgtcgccaggctagagtgcagtagcgcgatctcagctcactgcaacctccacctcccgggttcaagcaattctctgcctcagcctcctgagtagttgggattacaggtgcccaccaccacgcccggctaatttttgtatttgtagtaaagacgaggcttcaccatctttgccaggctggtcttgaactcctgaccttgtgatccacctgcctcagcctcccaaagtgctgggattacaggtgtgagctactgtgcctggccaaattttttttttttatagagacaaggtctcgctatgttggccaggttggtcttgaactcttggcctcaagcaatcctcccacctcagcctcccaaagtgctaggattacaggcatgagcgactgctcccagcctcatggtatagtttaacttgttgttctctacctacccaactcccagtttttccttttaattaagtgagtagttcaacttagaggtttgattagtcccatgttcaatttttttaggtaagaatccttcatggatggtgctgtgtacttcctactgcaacatatgaagaggcatgagggcaaaaaaaacaaagaaaaaaaaagggggagctgttatagaattaaagagatctaagagatacaacaagcaaatcgaatgcacccacatcatttggatcatgattcaaacaatccaatgttaaaagacaatgatgagatgatcagaaaaaaactgaatgtggactaactattcaatgaactaaagaaataggctgggcacagtggctcacacctgtaaccccagtactttgggaggccgacatgggcagatcacttgaggtcaagagttcaagaccagcctggccaacaggaagaaaccccatctctacaaaaaaatacaaaaattagcctggtgtggtggcagatgcctgtaagcccagctactcgggaggctgaggcaggagaactgcttcaacctgggaagtgggaattgcagtgagccaagataacgccactgcagtccggcctcggtgacagagtgagagtccactcacccaaaaagataaggaaagaaattattattaacttggatacactgaaaatggtctaggatgggtgaagtggctcacacccgtaatcctagcactttgggaagccgaggcagaaggactgcttgagcccaggagttcaagaccagcctgggcaacatagcaagatcctgtctgtaaaagaaaaaacaaaaaggaaatggtctagtggttataaatttttttaatgaccttactggttagagattcatactgggatacgtacaagtttcaaggcatgaagccttggatttgctatgaaagtctccagactaaaacaaaagtggaggcacagataaatatgactgatatgacagatgaatatgaattgataaccattgaagctaagttatgggtaaatattatactcaatttccatgaaaaaaagttagagtcatcagagcctgatgagttctatctaatctttacagtacagagatgactccaatattatgtaacattcatcaatcacagaaaaagtgaagcctctctaacaattatataaaaccagcatttccaaacacaaatcaatagaataaaaaaaaaaagaattatagagataggtgcttttccattgattttcatccttccttcttttctaatacttgcattcaaggttataaatttcctccactgactgcttaggttaaattcaacaagggtttacatgtagaattcttattaaaatgcaattgaaaatatttccactgtgattttttgaactcagattatttagaagcgtatggcataattaacaatcattctgacaagaaaacagcatgttctgaattgatagttccaaaaagtcacatgactattctatggtgaataaatcattttgatattgatttatagcttaattccactatagttagagaaaatattctatatggttttaatcatttgaaatgtatttagacttgcctgatggccaaccatacggtgactttttataaatgtcctatgtgcatctgaggaaaattattgagtgcagtgttttatattggtcaagtttgttaattaggtatgtcattctaacctttcaggggttgggactattgtgggttagctgaatgtttttgtaaataatgttttatcagaacacagccacacccatttgtttacacattctgtacagctactttcattctataattgcagaacctagtagatgcagacaagaccatttagccggcagagactaaaatatttgtcatctgtctgcacctttacagaaagtttgccagcaatggttaatctatacccttttagctttttgtctgcctgttctctcagttactgagagaagtatgttaagaatttcccattatgattgggcatttgcggtttctccttgtgtctagcatactccattcctctatacttaacacactaagtatatgctctattgacttttttttgagatggagtttcattcttgttgcctaggctggagtgcaatggcatgatcccagctcactgcaacttctgtctcctgggttcaagtgattctcctgtctcatcctcctgagtagctgggattacagacacccgctaccacgccctgctaatttttgtatttagtagggatggggtttcatcatgttggccagatgtctcgaactcctgatctcaggtgatctatccgcctcagcctcccaaagtgctgggattacaggcgtgagctctcatgcccagccctcaatagaacttttatgcaccaaaagacatgtagaaaaacgttcatatcaacaatactcataactcccataagccataacaatgtctcttgatagtggaatggataatatggggtataatcatcaatggaatactacacagtaatgaaaaagaaacgagctactgctatatgcagcaacttagatgattttcacaacaaaaatattaagcaaaagaagccagccacaaaagaatgtgtaccttaggatttcatttatataaagatgacaaccaagcacatctatgatgtttttaagataataattacctttggagaggagagagaagatgagggcttctgggatgctacattattctatttttttaacctggtgattttcaagtataatcacttgaaaaaaacttaagagaccaatttctcttataaatgtataggcaaaaaaattttttaactttctactatgaaaaatttcaagcaaaagaacagtatactcaaattccacatattcatcatgtgacttcaagaatgacgaactcacatctaattttgttttatctataccaccattcagtccctctccagcaatggattatggattattccgaagctaatccaagatatcttttcattttttgatgcaaaaatattaaataaaattttagcaaataaaatccagtctcatattaaaagaacaaaccattattgacaagtatggtttattccctcaggaatacatgaaattgggaaatagagcaacacaaatcaaagaaaattttaaagagaaaaaaataaatgaaaataattgtaatggtcaaaagcccttaggaaagagaaataaaaacttgataaatcacagtaattatttattcagaccatactacgtacctagtactacactttgaacatacttaaagaacatttgctcacttaatcttcataatgattccatgaaaaagaaactatgacagcttttttccacaaataaggaaactgactcagagattaacgtacccaagtcagaggcagaggcaggtacttcttactccacagtccatacacttgccacctggctaaaattatttgcagatgacaaaaatgctcaactagaaaaaagacgtcaatttataagttatatgtaatgacatgagtacaatgaagtgacagaataaacatatatatttttaacttctgttcttgtcaactaagtaaaattaggaacaaaaaaggaaagggggaggggtcttatgcaaaaaaaaagtcacgatttacaacaaaaagtattaactatgtagaaataagcataaccagaaatgtccaagatacgtatggaaaaacactacagatagtcaaacaaataaaaatattgggttaatagaaatccatcacatgttcctgaaagtgttgtatctagatctacatcaattctacccaaattaaagcaaccacttgatgaaactgcagcaatttaaaaaactctcaaagagcatgtaatatgggaatacgaagttgacaagatgttattaaagacgaataaaattataccaatacctagacacctgatcccaacattaaacatgaaatacactaaaccagagttattttctggaggagtatttaaaatgatggggatgttattacttgggtcgcaatgaacctgaaaacccattttctacagaatatacagcagcagggaagcaaggggaccagcagacccctttttaagtacgcatgtgataagcaatgaacacgaactgcccagagcagtctccaacactgacacgattcgcttccccaccacgacgccctagcgctactgtgcaacgaagacctcccaagcactggttccaatgcggagaccatgggctcccagactctgggaactccaacacgactgcgaaacgaactccgagcgaggactccccgagagctccccgcaacacggacctcacgcgctagcgaacaacagaaaaaaaaaagcgcgctctccctgcccctgaaacattcccagaagcccacgcagaccagaccgatgacctgtctccactgctggaggcgagtcagggacccgaagtctctaaacactcgcctctacccgccgccccgcgaaccccacacactgcagacgcgacactcgcaagtttcggggatggcggccggcgagggccatactgcgtctttccggagacacggaatacggcaccagccgtccctttatgatgcaatatgtctgcgcccaggggacgcttgctgggagcagccattttcaaccctactgccgtagagcaggcggagtccctcttttcgcgccttaagacaggtaggttctgacgatgaaaagcaattgaaaacgacccatttcaccctttttccagtccacgtgaactgctagatcttggctttgcaacattagccaggggcgctacataaactgcttagtttctcaaaggctcaagcctgccctgatctgtctacaggatgggtagagatggtcacagacatttaggcactttgatcctaagaagaatggaaagaaaccatgtggcgcggcagtcttacaggaatttcaagagggagggacctgagcaacaatcggaggggttattactcctgaggatgcatctggctggagaaagcagcctttgagaactgcctaagaagtatctttacatctacatcagatgtagcctcagaggaaggagtcagtcatagaatggataaaacaaccgcgtgttaaagctttggttataattggtgtggagaatggagaacacagttgatcagcagttgacaaagtggggaaccaacacgaaaacagggctctctcaccctggaaaagccaaaggcagaacaagcctttacatccaggaaggtgggagcaacttgaaatcaaaactctgaaggggagatgattctgttcaatactgaaactcagctgatcaattaactgatgaattctagcaccaaacctgctccctataattttataaccagcctcagagaacctttaaagggattgatcattcactcatttatccagcgaatgtttataaaatgcctaatgtgtcaaacactgttgtgcgtgctgggaatacaacagttggaaattcaggcacaaagactctcattcatggagattacattctactggcaatttcagtgtgtgagctaaattgagtggtgctaactgttgacttggctggttgactgaaacttggactcaaaatttgcctacactaaatgaagtttaaatgccagaaatttcctcatatattataaagtacccaaagataaatggagtttggaatgctagaatgaatttatcatgtaaaatcaagattacccatacctcaaatatgtattccagtagcatctagaagacaatctcttcactgacactgatctggtcacaggaaatagagatatactactgtaagattattttattatacagtaagtgatataatgtccttgaagttagaatgataagttcatgattttctttcagtcagttcaggctactagaaaaaatacaccatagactgactgactgccttaacaaacattcatttctcacgttccagaggctgaggagtctctagaactggactctaaaacacaatcaaggtgttggcaggtctagtgtccagtgagagtccatttcctggtttatgcatggtcatctcattctgtcttcacatggcaaagagcagagaaagagaaaacaaactctcttctgtgttgtctcataagacacataatctcatcatgagggttccactttcaagatgtaattaccttccaaaggtcacacttcctaatgccatcccttagggattaggacttcaacatgtaaatttggagaggacataaatatgcaatccctcacaatgatgtatgctataaaatctcaaggaatcaaatgacaaggatttacagttaataagccaacaaaggagacaatatgtaatataaacacactcagctactctaagggaaagcagaaaaagaagaaaaggagaacaaagaagacatagaataaacaacaaatagtaagttagtaatttaaacctaaaaacatcaatacattgaacgtaaatgatctaaataccccagtaaaaagacagagattgttaactggataaaaaaggaaggcccaactgtatgttgcccactaaacacccactttaaatatgaaagcataaataggttaaaagtaaaaccatgataaataaagatatgaaagatataacagggaaaaacccatgtcaaattattagaggttaaaaattacaatttctgagagaaaacatactttggatgggattaatgacagattaaacactgtggaaaaaagattagtgaactgaaagacatagctatgagaactataaaaaatgaaataatgaagggtaaaataataaaaagcatgaacatcattttcatgtacatatgtgtatacacaaaaagatttgtgaacttgaacaaggcaagagatacaatctaaactacaaagagaacaaaagctaacccctaccttggcccccggagtaagagatatcattctgaggaacaccaagtggaagcctctaaaactgcccccctccccagccaaactctatgatcaagatagtaaatgaaaaacaatattgtgggaggggtagtgaggtttataagatataaaaaagtaaaatatatttcatatcttgtaaaccctactatacatattagtgcagggagccaaaggcccatgggacatgacaaactcagcattccgctggaggctatatgatcaaacagcaaactgtttatcatgaatgcaggatgtgggcaaactcacactgccctgccaccattgccacagttaccatattaacagggcttttcccctgcacatgttcactaggacttaagctgtgacttgctgtggaaggattttccaccttcactgaatccccccgtttctcccttgagtgtattctcttatgtttaacaaggcaagacatatagaagtaagctttctcacactcatcacagccatagggtctctctcccgtgtgagttctgtgatgtacaatgagcattgtctttgtaaggaaggctttcccacagtcactgcatttatagggtttctctcctgagtgaattttctgatgtctaatgagtcctgacttctgtgaacagggttgcccacattcaggacatacaaagggagtctttcctgtatgatatctctgatgtgctacaaggcaagacttctggctgaaggccttgccacagtcaatgcatccataaggtttctctccagtgtgagttcgttgatgtatgttgagattgcccttctgaatgaagccttttccacattcactgcatgtatgaggcttctctcctgtatgagttcgctgatgtacaacgagtagtgattttctggagaaagctctcccacattcgctgcattgatggggcttaattcccgtgtgaatcctttgatgttcagtaagctcagatttcctggggaaggctttcccacattcactgcacccgtatggtttctctcctttgtgagctctctcgtgttcagtgagcctgtacctcttgtagaaggctttcccacacaagctacacccgtggggtttctctcctctgtgagctctctcgtgttcagtgagcctgtacttcttgtagaaggctttcccacacaagctacacacgtggggtttctttcctgtatgaattctcttatgctcagtgagctgagacttcttgaggaaagctttcccacagtcagtgcattcatgggctttctctatgttgtgtgtttgctgatgtttaaggaattgtgacttggtgctgatgggttttctactttcagggaattcaatttccgtaggcatttgttcatgattatcatggagaaaagctccatctccattaaactcagcaggctcctttctgttgtatcttctgctctggttggttaaacctaaatatgatttcaaagttcttccgtgttcatagcgttgtcccgtcctcttcagtattttttggttttgcaagggctgctgcagatgatcatcagctttctcaatttctaagagagagaacaataaatccttccatgatcatcacacggaataaaactgcttcaaagatgccttggggttggctggctttttactggaacccctataataccaacatggaaggaattccaagtataagtgttccctatctgttaaaaaaacttttaagaattgtagttaaatacatataagataaaatttgccagctgggtgcggtggcttatgcctgtaatcccagcactttgagaggccaaggcgggtggatcacaaggtcaagagatcaagaccatcctggccaacatggtgaaaccccatctctactaaaaatacaaaaaaattggctgggcgtggtggcacgtgcctgtagtcccagctactcaggaggttgaggcaggaaaatcgcttgaacctgggagacagaggttgtagcaagccaagatcgctccactgcactccagtctgccaacagagcaagactccatctcaaaaaaaaaaaaaaaatttgccagccaggcacagtggctcatgcctgtaatcccagcactttgggagggtgaggtgggaagatcacttgagcccaggagtttgagaccagcctgggctacaatagggagactgtctctacaaaaactttttttttaatttaaaaaagaataatcctgagtagggaaacagcagacataggtagtagaataaatatcccagaaaggcaagttagaatgttggatacacagcctttgacttcatcctaatcctattagactgttgggtgctaaaatatgcccttctccattctgtagaccatcatcacgctaactttcctagagcaccaatctcatatttccaggaaaactgcagtcaatactctaacctttgttaaaacagagatcacaagactgatggaacagactctttgtagcaataagataccaaactataaactaggtctaaggacatacaggtaagggttaagtcacacaccccctacatttaaagaataaactatgttctaactgccacgagtgttttttgttttgttttgttttgtttctttttctgtagcagctaaacaaacactggccttgggacaagcaatattgaaacaattgcagctcccggaccaccagatgctgactaactgatgcccctcacccccaacagcattccacaggccataactgcagctatgattggacaggagactgatctcaatatccttctcctgataaacaccagctgttttggtcagctgccggagtctgtgcagacttttcttatatcctgtaaaagacctgctagcatacagtcaaattccacctcattttaatgttaaaactccactccaaaatgaaagtggattatatgttacatatatgtttgctcactatgcacatgtttgctgattctcataaagatattcataagactccccatctctcactgaataggtatgcaaagcaaatcctagaaggcaaaaagcctcctgcaaggcaaaaaaaaaaaagtttcccctcttcagtgatgtgtgttttttccacttcctcaaagtcacaccactcagatctgcgaatcatcttttgttagaatataaagtttctctttgcctcctcaattttttggttaacaccttgtatctacctggctatgatatattctcatatgttccaacagaaagagaaacagggtgatccctatggactttcagaacatgcaagcagaacacgtggtcctctccacacagctctgccactgcaccaaatatggaaactgtcaccttcttcatcatgccctacttgcacagatgtcatattggattttttttccactttgctgtccctaatatactaattcctcaccttgccactaacagcctctactctctgaattttgtacttatgtctctgttggcatcggtgaatggagccctcaaggaccacctccctacttctgaatcaagacttgaggcagctttacttttagtttttcttagaacatcagctatacagtatgattgctatagtactgccaccaggtgaaaggtaagctctacctagagctagaaaaatacaaaactttacctccaccactaccctgaattactggcacagaaaattcacagcaggagctgaacaataaaagttttaccattaccatgacgcatccactttaagttcccacttcaccatttcccagcaaatatcttctaactgtggcctccatgtgaccagtttcaagctaatcttttttttttctttttttttgagatggagtcttgctctgtcacccaggctggagtacagtggcacgatcttggctcacttcaacctccgcctcccaggttcaagcaattctcctgcctcagtctcccgagcagctgggatgacaggcacgtgccaccacgcctggctaattttttgtattttatgtagagacagggtttcaccacattggccagactggtctcaaactcctgacctcaggtgatctgcccaactcggcctcccaaagtgctgggattacaggcatgagccaccgcacccggccttcaggctaatcttctgacagtccccacatggccttgcatttccagttctacaacttcttgtcatatgtcttcatcttaattcaatacctagctatgtctcttgcataagatattttatcagtctgtctttctccatcttgtctagaccactgtaggttacatttcttctaaagtcctacaattctttctgtatttactattcactttaactttgtatagccctgaattgtaacaaaaacatttcacacgttcaaaagtttaatttgtaaatattacataaaaatttgccctatttttgctaacaaaatctttgctcaagaaagacatttctgtttctcactaaattcagtctcttctactgtgtattatggctacagttcatcaactcataaaaacagcccccgagagagcttcatgtaaagacacgcccaggcccccaactcaattctaacaaaaccagactcacagagcaagaggccttggtatggacagtgtcatgaaaactcctttaataaagatctagcctttaagaaatgcttaatagatggaaaagtatgacctctcttcagcctggctaatctgtccttcgatgaagaaatgcatgaatgaccaagatgtatttcaatcttacatgaagaagaatgaaaaccaggcccttgactccagagtagcaaaggaacctcaagcaccaccaaatcacactgatgtggtatctatgggagtggcttgtgtgtgattgggatgcaaagtagaatgggaatttagacatggaagatattattatattgtagtgtattaaaaaccatttcatgaaaagaaaattcaaggtgaaaaatacatagtgtcagaatgtgaaaaacaaaccataatcacataccgatgcctcagtttttttgtttttttgtttttcgtttctttttgttttttgaaacagagtctcactctgtcacccaggctggagtgaaatggcgcgatctcagctcactgcaacctctgcctcctgggttcaagtaattctcctgcctcagcctcctgagtagctgggactacaggcacatgtcaccacgcccggctaatttttgtatttttagtagagatggggtttcaccatgttggcaaagctggtctcaaactcctgactttgtgatccgcccgcctcagcctcccaaagtgctgggattacaggtgtgagccaccatgcccggcctcctatgcctcagttcttatctcacttgatgaatcagtaactctagacaatgcttatggcactctttctccctctctctcttatataaatgtatatatacatataaatatataaagtatatatataaatgtatatacacacatacacacacacatacacatatatacacacacgcatatacatataaatgctgttctagcaaattaatcaaacttgaggagagggtcttgggaacccctactttacagctggttggtcagaagctgaggtgacaacctgggacttgccactggcatctgaagtgggacacagtcttggactgagcccttaaccggtgggatctgatgccgtatcaggtagatagggtcagagctgatttgaaacagacgatacccagctgatgtctgctggagaattgcctgggctgtgagaaaacaacccctatatatccagtggcataaatgctgtgttgagtgactatgtgacagagaaaaaaacagtttgtcgtttttgcctcagaaacacaaaatgatcctctgacaagtgatgaagaagaatgggaagatgtgaaaatccaagcaagaagaacttaggggaagcaactcaacatctaagaagaaatgaatagggatcagttccaagaagagataaaggggtatgtatgcttctctgaattcctataagaaaaagagctcttgtatcctaggggagaagaagatgtggcagctgtttctgtctccctagacactttcacaactgtcatgccttctctaaatgaccagaatgtgacttccgctgccttcccctcttgctggttctctctcacttacctgggtgggctggactgtggatttcatcttctagtgtccatagtggttctccttgttccaacttggtgagggcatcaggtttgccggcttgataccctgtttgtgggaaatgggagaagacttaggctcactgaattgcaccacgtggctctgatgataggagaaaggtacatgttagggactgcataatttgcatgttagcaaattaaaggctttttttctaagacgaaggaagattatgcctcttcctgtgggaccagagacgggcctgaggatctgccatttgggagcacagcagacataccaaagcttccagaagctgagaaagcaaaggccactgactgggtaccctctgagtgacacagggcagctgtcctcacccactgacacaaggttgctgtagttctccaacatcacatcccggtacaggtccttctgagcagggctcaggaactgccactcctcccaggtgaagtccacagccacatcctccagggtcagtgattcctgtaataacacagtcctgcttaatatgtttctcttttattgacatggaagaaatatgaagttgttcggcccattttcaccacataagctgcacctgcacagttgtcccttggtatactcaatggaatggtttcaggatgccccacatataccgaaattgtgcatactcatgacctacagttggcctagtggaatctgcttatgttactctgtataagcgagtttcacatcctgagaatactatatttttgattcaagtttggatataagtggacccttgcagtacaaattcatgttcacaaataaactgtattcctagttttttaaatatactgtgaaagaagcaaagtcatagtaaaatattctatattttataataaccatgcagccatccattaatccaacaaatcataagtttctgtaatatgcagccattaaatcctcttgctaacatgagaatgtctgcagtgtttttcagcacctacttgcaaccctaaactatatgctacagtcatatagtacgtgcagaataatctagcatgacccccttcatgtaaactataccatgatatttagcaaaacaacaaataaactatgcagtggccataaaaaataagccatcatacatgtaagcattgacatgcatagatacatgtatatgtatacaacgcatgtatacacacacatacacacgcatgcagacatagatgtcctcacaggtaaatccctagaacaggaagacaagcatttgttagtgacatactagggaattaggaaaaaaagtatacagagggggaactttgttttcacactatgtgtactatttaacttgagtctttcacattgaaaatctatccatgaggccgggcatgatgtctcacgcctgtaaacccagcactttgggaggcaaaggtgggcggatcacccgaggtcaggagtttgagaccagcctggctaacatggctaaacatggtctctactaaaaatacaaaaattaggtgggcatggtggcacctagatgaagcatgagaatcgcttgaacccaggatgcagaggttgcagtgagcgaagatcacgccactgcactccagcctgggcaacaaagtaagactgtctcaaaaaaaaaaaaaaaaaaaactatgaatctgtggttctttctgacaccaaatacacagtgtcttttccagcaacactttctctgatgccaactgggtatcctagagttcgatgctatgctaacactaaccgctgagggttatcatcagactctgcaggtttcagggctcggtcccacaagactgccctcacatcatgtgccactctggggtccccacgttatcacacttctgtccaacttgaccacaactggaggttgccacaacctccctgctcaggttcgataatttgctagaatgactcacagaactcaggaaaatgtcacacaattacagtttattatataggatacaaatgacagccaggtaaagaggtacagaagtcaaggtccaaagggtgccaagcacaggagcctctgatcccatggaattgcagtgcccccttcccccaccccccacttccacatgtgatctccaaaccccatgggggtttttatggagcttctacgacgtgggcatgattaaatcatcaaccatggctgggtgcggtggctcacacctgtaatcccaacactttgggaggccgaggtgggcagatcatgaggtcaagagatcgagaccatcctggccaagatattgaaaccctgtctctactaaaaaaaaaaaaaaattagctgggtgtggtggtttgtacctgtggttccagctactcaggaggctgaggcaggagaattgcttgaacccagaaggtggaggatgcagtgagccgaggttgcaccactgcactccagcctggcaacagagcaagactccatctcattaaaaaataaaaaataaaaaaaagaaatcatcaaccattggtcacagaatctggaggtcgggggtgggactgaaagtcccaactctgtaatcaaggcttggtctttctggcaaccagccccatcctgaggttgtctaggagcccattctgagccacctcattaccataaactcaggtgtggttgaaaggcactggttatgaagaacaaaatacactcctatcactcaggaaattccaaaggttttaggagctctgtgccaagaaccagagacagagaccaaatatatatacgtgtaaaaccataatgagtcatttgcataattttttaagttaaggcattaaaagaggtgagaggttaataactggatttgaacacagggaagggctctgtattttctgagacaacatgacattctaaagcaaaccctgtggatctcaacaacccaagccattgccaaagagaactttcaactccctttggtcaaatctgtacttaaacaccagtttagtgacctgttcatggagctcctttgaaagcaaaccttgcattttttaggcaattaggtttactcacagataaacacagactgcaacaaggttgggtatataggccgcagtgctgtgagctctggaaaaactgtgttcattaaacccttcttggtatagtcccatagaggactcagaataatcatgtagaaacagtcacacaaaacttgcttgtgtatcttttggaaaaatgctgttaaggacaaaaagtctatcttgtcacctctagcaaaaagcatcaaactaatttcccaagatttaagtgccatgaaatactgacatcccctgaggaacggacccgctttctcctcagaatcagtgcacatcatgtaacttaccatgattctctgggtgtgatggtggccaaagattttggacacaagctgacacttaatgtagccaacagggtctggcagagtcgcacattatattccaacactggtcacatgtgaactatgtgaacaaagtatttgtgatcccactttgtcctggattaaaggtacagtctaagtctgtttctccccagagctcattttttccaatttatacttttaatgtaaatgaactgatttcttcagacttccacaaatccatcagggaatcgagttaagaataaaacaaaccaaaagttacctgggcctttgtcattttcttctgtttcaggaaatacccaagaactgggatgcttcgtctttggtttcttctggatcctccctaaattttggctaagaaatctgagtctccatttaagagtgttcccagaaatgatgacatccacatccaggaacctcctccttccttcatttgaactctcttgcttctggggagccaggacctatggagtaaaaatcaagttcatttggtgacacattccctccgggcccagatgctgtctctgctgctgtaaactctcctgcagtcaaggccaagcaatatatctaagcatccctttgtcaggtgtccccaagtctttacatcccagggcaataaaacaacactctgaatgtggggagtcatatggcagtgggcttaaccaggagccggcatatctggccactttccaatgcttcaaaggagtgtctttctccttaagcacagtgtttataaataagagagcaggtcacgctctggtcatgagaacgtgatggtaataaggaggctttcctcctcagaggcctcctgtgattttccaaaacttattgtcccatatttttatggccagtttatgccagcaccccataagcctttttcccaacaatcgtgagacacacagagaagaaacacacaggtaaaagagaaggccatgtgaagatggaggcagagactggagtgatgctgccacaagccaaggacacctgagagtctgttagaaaaggggagacaggtgaatgaatgtgggcagctgtgccggagcccctcaagaccactcccagatgcagtgattcactaggtgaactcacaacactcagtctataattatattcatggcaaccacttattactgtgaaaacatacacagcaaaaccagcaaaggtaaaaggtacatgtggcaaagtctggaggaaaccagacataagtttcaagttcagtctctttggagtcacacaggatacacttaattccccgagccacaagtcatgacaacacacgtgaaatgctatagaccaaggaagtttattagagagagattgtgtgccatggtttttattgggggctgatcgtgaaggtgctcactgcctaacattcaccaaaactccagaatcctagaggaaagcatgtgttcaggataaatcacattgtttgaaaaaaacagcttaggcacagtgagccactcttattaggaaatagtgggactgcctccaaaaatctaagctcccaaatgccagctgctatggtttgaatgtttgtgtcctccaaaattcatgttgaaacttaatctccaatgcaatggtatcaagaggtgggcttttagtaagtgattaggtcatgagggctcctcccttgtgagtggcattaaggcccttataaaagaggctttggccaggcacagtggctcatgcatgtaatcccagcactttgggaggctgaggtgggaggatcgcttgaggccaggagtttgaggctgcagtgagttgtgattgcaccactgcactctagcctgggcaacagagcaagaccctgtctcttaaaaataaaaaaataaaaaaaaataaaggccgagcgtgttggctcacacctgtaatcccagtactttgggaggccaaggtgggcagatcacttgagctcaggacttggcaacatggtgaaaccccatctctataaaacatacaaaaattattcaagcatggtggcacatgcctgtattcccagctactcagatggctgcggcaggaggactgcttgagcctgggaggttgagaggttgagactgcagtgagttaggatggtgccactgcactgcaggctgggtgacaaagtgagactctgtatcaaaaaaaaaaaaaaaaaaaaacctaaagaaagaagaaataataataaaaataaaagaggcttcacacacagatcggccctttctgctcttctgccttctgccatgtgagggcaccgcattcttcacctccaaagaaatagcgacaaaacaccatattgaaagcagaaatcaggccctcaccagacaccaaacctgctggtgcttcgatcttagacttctcagtctccagaactataacaaataaatttctgttgtttataaattatccagtctcagctatcttgttatagcagcaccaacaaggctaagacagcatcctataatttaattcagtctgagactgtgtatctagatatagtgtcagacaccacagattaagggctcagttcaagcctgcccccaacttcagacgcaagttgcaagcagcaggttgtcacctgtacctctgatggaccagctataaatcaggattcacacggcctcctcctcaggttcgattaatttgctggatggctcacagaactcaggaaagcacttaacatttactggtttatttcaactcttttcctgtctagaaaaacgaagtgcagctcactgccagcgcttatttcattttacataaacatgctctttgaggctgcagtaaatctgattttcaatgtgaaaataaaatataaaagctgttctaggagttatttctaaacagaactaacatcagaatcatctgaatcatcagaattctcgatttggaatcatcagaattctcgatttggtaaaaatcggatccatccagtgagtcttcagccaagaactgtttgagaatgatgttaacatcacatgtaggaatgctacgttttctaggatttgacattttcagtgatcgagaactactacattttgtaaatggaaataccactactaaaaacagaatgctataagtagaatgatgtcttttgtttcccaaggcgacctactagagcgatgtgaaaataataaaagtgagatcgttcatggcaaagttatctcggggtaaatgctccagctgcaagcaccaaaggtgagtattctcagggcaaatgggaaaaggaataaaggatattacgaaggatacagatgaagaggcagatggaagggatagcacagagcaaggtttgtagcaaggggcgtgggacttccatgccctccacggaagcttattagagactcagttcaccaccctcaggcacctccacatgctcaagaatctgtaagttccccagaagttcaccagtccttttgagtttttacgctggtttcattatgtgggcatacttgattaaaacactaaccactggtgatcaactcaaccttcaacttccctgttgccaggcagagctaaaatttccaaccctcaaatgacatggttagttgccctggcaaccagcctcccccgtcctaaggccagccagaagcccccagtcaccagccatctcaatgccacacaaaaaggcactgtttactgaagaggttccaaggcttttgggagacatgtgccaggaaacaggacaaagatcgattatacatttcttataaatcgtaacaatcatagctaggcgcgatggctcatgcctataatcccagcactttggaaggccgaggcgggcagatcacctgaggtcaggagttcaagaccagcctggccaacgtggtgaaagcctgtctctactaaaaatacaaaaattagccgggcgtggtggcgggcgcctgtaatcccagccactcgggaggctgaggcaggacagtcgctagaacccaggaggcggaggttgcagtgagctgagatcgcaccactgcactccagactggacaacagagctagattccgtctgggggataggaggaaactttgatccccaaatgctcaaggagactgatgcttaagcaaactaaatattgcctgagaacgactccatacttctatatttgagtccttgtggataaactgcaacctagcttaacagacaaaattgaaaaccgaacttaatcgtatgcacctgtaacaatagctgagtggtggccagtcccagcggccatactcatagactgctgaatgttccaactgcgttcaaataaggcaaacgccgaatggtaaccaatctcactgtttctggacctcgcttccgattcctgtatgtcactttaccttttttgtctataaatttgttctgaccacgaggcacccctggagtctctgttaatctgctgtgattctgggggctgcccaattcgcgaatcgttcattgctcaaggaaactcctgtaaatttaattcggcttcaatttttcttttatcactgatttgagtaataataaaactccggtctccccgcacagccggctctgcatgaattgctctttctccattgcaatttccctgtcttaacaagtcggctctgtctaggcagccggcaagggtgggcggttatagtttcacaactcaaccccagccaggggcctgggcttgtaaaataccagattttacaagcctctgagccccacatgcctgggcctccccgaaacacttaacacacatccccgattcaccccaaaacctacaccacacaccctcgtacgctgcccagcaccccggcttcatcaccgactttaaactgcagcatttggagtgataataatggcgtcggtgataaagccggcgtgctgggcagcgtccccctagagttctccatccagtgatccagaggcctactaacagagtgaccctcagagaccccaaactctgacgccgagtctcagtcgctgaactcgacagacctttaacgcccgaccacaagaactctcccacgccggaccgcaaaggcaccccaacccaaaggctccaccgcccaggccgccagctctccccacaggctcctcagaagctccctacccctttaacctactccacggagagacccaaacactcacctgattttcttctggctacacctaaattccctgaatgcttcctttcctggcccttaaaccccggcactggcctatggcggcggacgagggcgcgagtcaattctgccgcgctaggacgatgggacatgggcttctcttcgaggaggtaacatgtccgcgccctgagccacggctctctgggcgcggccatcttggtagatctgccgtacagaagggaaacagttgttcttgtgtcattaaaccgggatgactctcctgaaagcaaaaatttgaggcgcaggagcattttctagagtttatctgaacaaacagcaattcatgaattaggaagcatcaaaccaaaagaagtctcgcgcttctatgcttaaagcattagacacaagtattcacagggtgagtgaaggagtaaaacaaagaaattatttgattagttacaattataaaaatgcatttttttaaatttgccttggaaagtccctaatgacataatagcatgtgagttgcctacttttgatcggttgagattgagttttgtccttccctaacacaagcatttaccagaaatgactcaagtgaattgttgcttatgtttgcaggttaagcaaggttaaggctgtttttaaggcctactgggttttgtttgctcaggagtttttgaattctggtctgcattttaattttgctttgacacaggagacagtgaaatggcactgatgtgttccctctcctgacacctcaacccctgcactgtgaggttggagcactaacaacagtgcactgtggggaaaagaaagagagatcagactgttactgtgtctatgtagaaagaagtagacataagagactccattttgttccgtactaagaaaaattcttctgccttgagatgctgttaatctgtaaccctacccccaaccctgttctcacagagacgtgtgctgtgttgactcaaggtttaatggatttagggctatgcaggatgtgctttgttaaacaaatgcttgaaggcagtatgcttgttaaaagtcatcaccactctctaatctcaagtacccagggacacaatacactgcggaaggccacagggacctctgccccagaaagccaggtattatccaaggtttctccccatgtgatagtctgaaatatggcctcgtgggaagggaaagacctgaccatccctcagcccgacacccgtaaagggtctgtgctgaggaggattagtataagaggaaggaaggcctcttgcagttgagacaagaggaaggcatctgtctcctgctcgtccctgggcaatggaatgtctcggtataaaacccgattgtatgttccatctactgagataggagaaaatcgccttagggctggaggtgagacaagctggcggcaatactgctctttaatgcaccgagacgtttatgtatgtgcatatcaaagcacagcaccttcttcttaagcttgtttatgacacagagacatttgttcacatgttttcctgctgacactctccccactattatcctattgtcctgccacatccccctctccgagatggtagagataatgatcaataaatactgagggactcagagaccggtgccggcgcgggtcctctgtatgctgagcaccggtcccctggacccacttttctttctctatactttgtctctgtatctcttcttttctcagtctctcgtcccacctgacgagaaacacccacagatgtggagaggcaggccaccccttcactgcacaaaccacacagatattcagaggctcaaatgcaaccaaggctgttgcgggaagtcagggaccccaaacggagggaccggctgaagccatggcagaaaaacatggattgtgaagattttatggacatttattagttccccaaattaatacttttgtaatttcttatgcctgtctttactgcaatctgtaaacataaatcgtaaagatttcatggacacttatcacttccccaatcaatatccttgtgatttcctatgcctgtctttgctttaatctcttaatcctgtcagccgagaaggatgtatatcgtctcaggaccctgtaataattgtgttaactacacaaattgtacagcatgtgtgtttgagcaatatgaaatgtgggcaccctgaaaaaagaacaggataacagcaattgttcagggaataagagagagaacctttaactctgaccgccggtgagccgggcggaacagagccatatttgtcttctttcaaaagcaaatgggagaaatatcactgaattccttttctcagcatggaacgtccctgagaaacagaatgcgcacctaggggtaggtctctgaactggcctcccccgggcgtacctgtctcttatggtcgagattgcagaggtgaaataaactccagtctcccatagcgctcccaggcttgttaggaagaggaaattcccgcctaataaactttggtcagaccggttgatctcaaaaccctgtctcctgataagatgttatcaatgacaatggtgcccaaaacttcattagcaattttaatttcacttcggtcctgtggtcctgtgatctcgccctgcctccacttgccttgtgatattctattaccctgttaagtacttgatgtctgtcacccacacctattcgtatcctccctccccttttgaaactccctaataaaaacttgctggtttttgtggcttgtggggcatcacagatcctaccaatgtgtgatgtctcccccggaggcccagctttaaaatttctctcttttgtactctgtccttttatttctcaagccagtcgacgcttaggcaaatagaaaagaacctacgtgattattggggcaggtcccccgatacaaggccagcacagtgccaagtatgtccacctcagtgagctgcggagaggtgactgcaccctttattgactgactactaggaaactgtcaagaggcagcccactgagcatggccatcttaaaggaatttcaggtgtccctacaacagagaatatgccttgagaaagggggaaaaaataggccacttagcttgggtagacaaggctcatgacaagtccctgcatctcagctactgactttaaaagttgtttggggaaaagaaagagagatcagactgttactgtgtctatgtagaaagaagtagacataagaaactccattttgttctgtactaagagaaattcttctgccttgagatgctgttaatctgtaacctgagccccaaccctgtgcccacagagacgtgctgtgttgatgaaggggtgggttgcccctcctcacctgtgggtgtttctcgtaaggtggaacaagagtcttggaaaagaaaagacacagagacaaagtatagggaaagaaattagaggacccggggaaccagcgttcagcatatggaggatcccgccagcctctgagttcccttagtatttattgatcattcatgggtgtttctccgagagggggatgtggcagggtcacaagacaatagtggggagagggtcagcagacaaacacgtgaacaaaggtctttgcatcatagacaaagtaaagaatcaagtgctgtgctttagatatgcatacacataaacatctcaatgccttacagagcagtattgctgcccgcatgtcccacctccagccctaaggcggtttttccctatctcagtagatggaacgtacaatcgggttttataccaagacattccattgcccagggacaggcaggaggcagatgccttcctcttgtctcaactgcaagaggcatgccttcctcttatactaatcctcctcagcacagaccctttacgggtgtcgggctgggggacggtcaggtcttttccttcccacgaggccatatttcagactatcacatggggagaaaccttggacaatacctggctttcctaggcagaggtccctgcggccttccgcagtgtttgtgtccctgggtacttgagattagggagtggtgatgactcttaaggagcatgctgccttcaagcatctgtttaacaaagcacatcttgcaccgcccttaatccatttaaccctgagttgacacagcacatgtttccgagagcatggggttggcggtaaggtcatagattaacagaatctcatggcagaagaatttttcttagtacagaacaaaatggagtctcctatgtctacttctttctacacagacacagtaacaatctgatctctcttgcttttccccacagttgacttaaggtttaatggatttagggctgtgcaggatgtggtttgttaaaaaagtgcttgaaggcagtatgtttggtaaaagtcatagccattctctaatctcgagtactcagggactcaatgcactgcagaaggctgcagggacctctgcccaggaaagccaggtattgtccaaggtttctccccatgtgatagcctgagatatgtcctcatgggaagggaaagacctgactgtcccccagcccaacacccgtaaagggtctgtgctgaggaggattagtgaaagagggaggcctctttgccgttgagataagaggaaggcacctgtctcctgtttgtccctgggaatggaatgtctcggtgtaaaacccgaacgttcgttctatttactgagataggagaaaactgccttatggctggaggtgagacatactggcggcaatactgctctttactgcactaaaatttttgtgaaaagtcagacataaatctggcctatgtgcgcatcgaggcacagcacctttccttaaacttatttatcacagagatctttgctcacttgttttcctgctgaccctctccccaccattaccctattgtcctgccacatccccctcatcgagatggtagaaatagtgatcaataaatactgagggaactcagagaccagtgccggcgtgggtcctccgtatgctgagcgccggtcccctgggcccactgttctttctctatactttgtctctgtgtcttatttcttttctcagtctctcatcccacctgacgagaaacacccacaggtgtggaggggctggcccccttcagttgtgaggatcaatatgtatactcatattaaagattgttttttgcttcaggctgtttggaaaacaccaagcgtagaaacttgaaattgtgttctatgaaaaaactggataccaaagccactatcaaggtaggaggtgggacttgactcaagagaccaggctccaacaccagacaaaattaaggactagctaaaacagcaacagggcagaagcagcttttcataagacttacccaccagtatgccatgtcacgtttaccatttccatggtaacacctgggagttattgctgctttccatgacaacaagctgatgacctgaaagttaccacctttttctagaaatttatgcataatccaccccttactttgcatataattaaaagtgggtagaaatatgactgaagggctgcctctgagctgctactctgggcatactgctccacaaggagtagtacctctgctgctgctgtgcactgccacttcaataaaagttgctatcaaaggctgggtgcagtggttcatgcctgtaatcccaacaatttgggaggctgaggcaggcggatcacgaggtcaggagtttgagaccagcctggccaatatggtgaatcaccatctctactaaaaatacaaaaattagactggagaccatcattctcagcaaagtatcacaaggatagaaaaccaaacaccgcatgttctcactcataagtgggagttgaacaatgagaacacacggacacagggaggggaacatcacacattggggcctgtcgggggtgggggactaggggagggatagcattgggagaaatacctaatgtaaatgacgagctcatgggtgcagcaaaccaacatggcacatgtatacctatgtaacgaacctgcacgttatgaacgtgtgccctagaacttaaagtatatttttaaaaaatacaaaaattagctgggcatggtggcgcgtgcctgtagtcccagctacgcaggaggctgaggcaggagaatcacttgaacctgggaggcggaggttgcagtgagctgagatcgcgccactgcactctagcctggaagacagagtaagactccatctcaaaaaaaaaaaagttgctatctaacatcactgtgggacccctgaattcttttgaaatgtaagatgaagtctttttgcaaaatggagttagttatgtcaagagtgctctgtacatgttgcgaactcaaaacagacaactccccattttctctctttttttcccccctgagatggggagtctcaccttgttgcctggagtgcaatgggacgatcttggctcactgcaatctcgtgacccactatgcttggccttaatattttctactatagtttatgctaaatctttttagagaaatccttccccacatcaagatcataaaaatattatcttatatttccttctaacacttttagagttttgctgttcaattcagggttccaggggttagcaaactgctgctcatgagccatatccagtccacagcctgctttgcccttgagctaagattggcttttaatacttttaaagagtaaaataaatagaatatacaacagagatcatatgtagcctgcaaagcctgaatacttactatctggtcttgcaccaaaatagtctgctgacttttatagtctaatacacgaaacattgatttgtgtaggatatgaagtggcacctgtaatcccagctacttgggaggctgaggcaggagaattgcttgaacctgggagacagaggttgcagtgagtggagactgcaccactgcactccagcgtgggcaacaaagtgagactccaactcaaagaaaagaaaaaaaaatcccaaaactccccttaagatgcatataccagcttacctacaatatctttttttttttttttttttttgagacagtcttgctgtcacctaggctggagtgtagtggtgcgatgtcagctcactgcaacctctgcctcctgggttcaagtgattttcctgcctcagcctcccaagtagctgggattacaggtgtgcatcaccacatcctgctaatttttgtatttttattaaagacagggtttcaccatgttggccaggctggtctcgaactcctgaccacaagtgatccactcgcctcggcctccaagagtgctgggattacaggtgtgagccactgcacctggcctgtcttttgaaaataggtggatgatctaactctgttttaaaagcctgattttggctgcaacttgtgtatataaaagacttctcagcaatcttgtgccttggttcccctgaaacaggtacctcacctatatttggtagttggtgatctggagacaaatagtatcctgtgtgactgaaaaagatccctggaatctgtgcctgtgtgtctcagaacatcatcatatttacatgtattttatttcattggattttatttttcatgctgtactgtagcctttgtctttcttggagtcttaggtaagtataacttgtggagtcatgtgagactgttcaacatcttaccctgagtaactgctataattgcagtcacctattttagggaaaaacattgtacttgaaaaggaaacatatttttgtaaaattaatatcaagttcagtgtattttataatttattctcaatttaagaaaaccgtttaggggactttgctgctacattctagagagggattaataaaaacatgtctcacatttggcttatgttgtttcaaagggaaacacatcttgcacaccttgtggctatgaaggaaagagaggcttattttatttgactataggatcaagccacattatctattcatgcaataaaaccaggactgcaaaaattatttaatttccatctctctgatatcagggactatctctcaaactatttagaattcagaagcggcataaaacctgtgaagactcatcttcctcaatccccaagtatttcgttggtttacaagaaacaaaaccctgtataaagatgacggcttctactatatttcatccaatctgagatacctttggttgtatggcacaccacacttttacacaccaagttctccatttaaatatgttaagccacatatataaataagtatgccacacttaaattttagcagtggtaatatgttggaaaaatgtctatcttagaattgatgagataaagttttacccaagagtggcacaacatcttccagacccatttacaaatactagcaaacactacagagataaagataaacagtattgtattgagttttttactgaaacaatgaaccacagcagttctgtggggagtcgaaagcctgagggtcgtgaccaattcagcattccactgcaggctatatgatcaaacagcaaactgtttatcatgaatgcagaatgtgggcaaactcgtatctgcacctgccaccagaaagtatgctgagggcaatcactgcctggcaccatgctccttgaggttatctactgggacatctggagcctactgttcaaagaatgcagtcatgcaggcctgcactaaatcaagcagctgaccgacaaccacccccgctccttgttttctttactcaataaatatgaagtgctatagaagctcaggggccttgttcactagaagcaagaagcccccgaccccttcttccaaacatattcttttgtgtttgtctttattcccacattcatcctcctttgttcagtccagtagggtccgtggcacagatcaattataagttacgtagcattatacaaagattcaatgcagatattctatgggaagtctttatgcacatttaatcatacatactacaaattcacaattgtgatgttaacacatgcagttcccaaatatgagcaatcatttttacaataaaaataggcaaaaacacttaaatatttggtattgttcttatattttttgctttgttttctgacaagcatatttatttacatatttaatacaatactttctataatgctgattatataacaagagcagaaaaaaaatacagatgaaagcatgatttcccagattcattaacatacaaaattacaaatttcttttttcttttccttatttatttatttattttttttttttagacaggctgtcacccaggctggcaaaatcttggctcactgaaacctccacctcttggctcaagtaattctctgcctcagcctcctgagtagcactatctccagctaatttttgtatttttttgtagagatggaaccctatgttgaaaacactggtctcgaactcctaagctcaaacgatccttccaatttggcctcccaaagtgctgagattacaggtgtgagccactgcacctcacctaaagtacagaatttcttccttagtgtcaattatctgaaactgatgtaactgcatattatgccaacaacatccccataatcagtaatacatagatgttccttcctgtgtgttccctctggcttatattcaattgacatttattgaaacaggtattacctcctgactggcatcatgcccagcactattctctgataagaaaggatgtgtaagcttgaaattaaggtttgttcacatttgctgcagccttgaggtttcactcttacattaaccttgtggtataatgagctagtccttctcactgccaactttcagatattcacttcatttatgatttctctcctttgtgtgttttctgatgtagaatgaggctgaatttgcggaagaaggttttccaacactcagtgcattcgtaaggtttctcacctatatgcgttctttgatgtataataagatgtgacttctgggcaaaagatttctgacatttgctgcattcgtggagtttctctcctgtatgtgttttctgatgtcaaaccaagctaaacttgacggggaaagttttcccacattcactgcatccataggatttctctcctgtatggattctctgatgagtagtgagactaaacttacgagagaaagtcttcccgcactcaaggcattcgtaaggcttctctcctgagtgaattctctgatggatcaggagataggacttccggctgaaggctttgtgacattctccacattcctaaggtttctctccagtgtgagaccgctgatgaatattcaggtgtgacttttggctgaaagtcttctgacactgactgcattcatagggtttttcccctgtatgagttctttggtgtaggatgagactaaacttgatggagaacattttcccacattcgttgcatccatagggtttctctcccatatgagttctccagtgagtattgaggaatgactttacactaaagccttttccacattcactgcagtgatacggtttctctcctgtgtgagttctctgatgtctactgagctcagatctctggatgaaggctttcccacattcattacacccatgcgatttttccccggtatggattttttgatgtaaaatgaggttaaacttaagggggaatgttttcccacactcatcacaaccatagggtttctcttctgtgtgagctctctgatggatcatgagctgtgacttattgctgaagcttttctgacatttgctgcatccatagggtttctctccagtatgagttctttgatggaaagtgagttttgacttatcactaaaacctttttgacatgtatgacactcaaagcatttctctcctgtgtgagttcgttgatgtttattaaggcatgacttatcagtaaaagctttcccacatttattgcactcataaggtttctcttctgtatgggttctctcgtgtaaaatgagacaggacttccatctgaaggctgtctgacatctactgcatccatagggcttctctcctctttgtgttctttgatgcttaaagaggtccaacttctgggaaaaggctttcccacagtcactgcagtcatactgtttctctcgtttttgagttttccagtgttttatgagctgtgacttatgactgaaagcctttacacgttcattatattcattgtatttctcttcagcatgaattttctcatgcttaggataaagaaaaactttgtcatatccattacattcaccttcatttcttgcatagcttctgttttgaataaagtactctagattaggattcaggtgtttcccaagtacaaaaggggtatgaaggtttgagctcagatgagatgttatgttgccaaatatatgatatttgtggtgtctgtccatagtttcaaggctgctttggttttctcggtgccattctgtgtgatcattgacttgccaggcatcttctagaaaggagaccaattaatccactgtgatcatgtaataaaaggagtagaagctcacagcaagagccaaggagagaagaggaagtgaaactgtgggtagagaatgaaagtctgagatatttataaatggaagaagaaaaaacagaagaaactatgagaggtatgaaacacatacaaaatgaagataagggaggaaaatttaggaatacttgaaaatagggctatgactatgaattagggggatgaagacagggaaaagcaagtaaactaaagatgccagggagaaagattaaccaggaaagcaagttctgagatgagccagagagggatttgatcagagtacctaaaagaagaacatggattcttttaaaagccaagcaaaagagttctaatatggagcaactaaaaagtggaggcagtattaaggtatgtgaggagcttatgtcagctgttcttagtcacattcacaactttaagaacttcaaaaacatttctccaaacagcatttcagagatgcccccctacttctgttcaactgggatattactttaagttctcctataggactggtttttcacttacctggacaaacctgactctggatttcttcctctagtatccatggttttccttgctccaaccagaataatgtgtctgctttggtaacttgataccctagaaaagtatcaaggaaaattataaaggacacatgaatgcaaatactagggctacaagacttctgaaaaatgatgaagattacttttttttttttttttgagatggagtctcactctgtcaccaggctggagtgaagtggtgtgatcttagctcactgcaacctctacctcccgggttcaagtgattctcctgcctcagcctcccaagtagctgggactacaggtgtgcgccaccacacccagctaatatttgtatttttagtacagacggggtttcaccatgttggccaggatggtctcaatctcttaacctcatgatccacccctcttggcctcccaaagtgctgggattataggcatgagccaccatgcctggccgaagattacatttaaggggttaaataatttgcatctgggccaagtaaaggccttaacgtccattggaaatgagagaaaaacactctgttagaggccagaaaagtactaaaaatctatgatgtattaaactgaagtctaaaaaaagtaaagtatttgtgaggccccacgctttttaattactcagaaaggaagggcaattgattgcctacactacccaggaaaactgtgcttacccagtgataccaggttgctataattttccaacatcacgtcttggtacagattcttctgaacagggtccagtagctgccattcttcccaggtgaaacccacagctacatccttgaatgacagtgagccctgtaatagaacattcctactcaattctaaaggattaccattgtgtaatgctatgaacataaatgataatttcttataatacattttcccagagtaagttatttggctgccttccatgtaactagttttgccttataatatataggaaaaatgttttagttaaaatatcctatttcggtacttccattcattcactgattcacatatttaattattcattcacaaaagagaaacagaacctccttacatcctttaataaaatatttaatctgcaacagcagtccccaactttttcggcaccagggactcgttttgtggaagacaatttttccacatactggggcaaggggatggttttggaatgattcaagtgcattacattaattgtgtactttatttctattattattacattgtaatatataatgaaataattatacaactcaccataatgtagaatcagtggtagtcctgagcttgttttcctgaaactagatggttccagctgggggtgatgggagacagtgacagatcatcagacatcagagtctcataaggagtgtgcaacctagatccctcgcatgtgcagttcataacaggattttcactcctagaagaatctaatgctgcctctcatctgacaggaaggggagctcaggcagttatgtgtatgatagggagtggctgtaaatacagataaagcttgctcactgacctggtccacttcctaacaggccacagaccagtggcaggggttgggaagccctgttctagagaatcattgagcctgagggtgggcaagggacactcaactaaaattcactcaaattcacatttagatatgtcaatgctgatacaggaaaccataagaatacacaaaaatgtttcaagattgattattttaaagatggtgaaaaaggattaagagggaactttcaggttttgcactataaaattctatattgtttgaaagtttgacactgcaaatttttttttaattcattcaagttggagaagtattataatgatgatgattttgtttagagacagggtattgctctgttacccaggctggaaggcagtggcatgatcacagctcactgcagccttgacctcctaggctcaagcaatcctcccacctcagcctcctgagtagctggaactacaggtgtgtgccaccgtgctcagctaacttttgtatttttttgtagagacagggtcttactatgttgcccaggctggtctcaaattcctgggctcaagtgatcttcccacctcagcctcctaaagtgctgggattacaagtgtgagccaccatcgcccagctcacattgtgaatattttaagcttcatttatataactggaattttaaaaaaataagtagataagtattggctttgaacagagagctaacactgcattcttgggtgtgaagagattatgaagggaaactctaagactctgtcaacataacttggaactgtttactaatcaatgtaaataggagtttctctacctcagcactacaggttgagcatccctgcttcaaaattctgaaacctataatgctccaaaatctgaaattctttttagggctgaggtgatgcacaaaggtcatgcttgaaggaaatgcttaccaggacatttcaaatgttggattttcagattagggatgctcaactagtaagtataagtaagtaagtaagcaagcattctgaaaaaaaaaaaaatctaaaatctgaaacacttccagtcccaagcatttctgataggggatgctcaatctgcatttgttggaggccgagaaaatgggggttgtgaccaacccagtataccactggaggctatatgagcaaacagaaaactgttctcatgaaagcaggatgttggaaaactgacaaattgcatctgccaccagaaggagtgccaagagcagtcacaccccaggcagagtgttccttgtggtttgtagggagccaaaggcccatgggacatgatcagctcagcattccactggaagctacatgatcaaacagcaaactgtttatcacaaatgcaggatatgggcaaactcacgactgtgcctgctgacagaaagtttgctggcggctatcattccctggcgctgaggttatctgctgggacatctagagcctgttgtttgaggaatgcaatcttgcaagcctactctggaccaaccaactgaccccttcttccacaccccttctcactatcccttttgcctaataaatacaaagggctgtgtaaagctcagagcctttgtccactagaggcaaggtgctccttgaccccttcttccaaatatactcttttgtctcgtcttttattcccgcatttgccccactttgttcagcccaccagggattgtggcaggttacatagtggccccccccaaacagtgacagaatcgagtgctccacagtggttatctataggaacatctgaagcctgttgtataaagaaagtaattatgtgtacctctaatgaatcaaagcagctgaccaaccgttacctctctctccctattgattctacctaatacatatgaagggctgtagaagctgagggctgtctttgctcactagaagcaaggagtcccctgaccccttcttttaaaatgtatctttttgtctttgtcttcacttctgcatttgtcccatttcgttcaatcccataggaacagactgtaacaggcattgacattttggtttggagaattctttattttggggcactgtagtgtcattgtaggatgcttagcagcattcttagcctctatccactagctccaattagcacaccctcctttcccaggtgtgacaatcaaaaatttctccagacattgccaaatgtcacctggggtcaaaaaatgaaaaccactgataaaaaaaaaagcagaatattgaggactctttgtggaagaccatatgatggtcatagaatccatccatcttaaaaatctctacattttatccctgaataaaaacagacccccaggaggctgtggactttggctacactgttctgggtccctgaagcactctgatcactgagtttggttttggtattacaccactggcttatctgtgggggcactaacttctatatgatctatatcatgacccatcaaagaaatttcttcttaagtaacatgaaatattcacttttctagaggagctttctcctcagggaaaaggaaacgatttgttattgtgtccatgtggtagactgcatttcccaaagatgaccacaataatatctcacattccaaagaaaaccttctgctaaatcttgccactcccacacgaagagatggagcctattcccttcccccttgaacctagctagtcttggtgatttgcttgtacctgcagaatacaacagaggtgacacaacataacttccgaggctaaggcagaaaagcatgggggaaagaatgagagatcagactattactgcatctatgtagaaaaaggaagacaaaagaaactccattttgatctgtactaagagaaattattctgccttgagatgctgttaatctgtaaccctagccccaaccctatgcttgcagaaacatgtattgtattgactcaaggtttaatggacttagggctgtgcaggatgtgccttggtaaaaatgtgtttgcaggcagtatgcttggtaaaagtcatggccattctccagtctcgagtacccagggacacaatgcactgcagaaagccacagggatctctgcccaagaaagcctgtgtattgtccaaggtttctctccactgagacagcctgagatatggcctcatggaaagagaaagaccagactgtcccccagcctgacacccataaagggtctgtgctgaggaggattagtgaaagaggaagacctctttgcagttgagataagaggaaggtatctctctcctgctcatccctgggaatggaatgtgtcagtgtaaaacccgatcgtacattctatttactgagataggagaaaactgccttatggctggaggtgagacatggtgggggcaatactgtctttacttcactgagatgtttgtgtaaagtcaaagataaatctggcctatgtgcatatcaaggcacagcacctttccttaaacttatttataacacagagtcctttgctcacgttttcctgctgaccctcttcccaccattaccctatagtcctcccacatccccctcaccgagatagtagagatagtaatcaataaatactgagggaactcagagaccagtgttggtgcgggtcctccgtatgttgagtgccggttccctgggcccacttttcttcctcgatagtttgtctctgtgtcttatttcttttctcagtctctcgtctccaccttgtgagaaatacccacaggtgtggaggggcaggcctccttcatctggcacccaacatggggcacgaacccatgaccctgagattaagagtctcatgctctaccgactgagctagctgcagaatgcaacagaggtgacacaacataacttctgaggctaaggcagaaaaggccctgtggccgcatcttggctgtctcagagccagcatcatgctgtgagaagcccatccatgtcacatgtggaggtcacacacaggtgctctggctggcagcctccttgagcctagttttcaagtaatcccagcctggcacacagatacagagaggaagaagccttcagatgattccagtccccaaccttctgagtcttccagttgagattcaagacatcatggtgtgaagacaagctgtgcagtaaaggataaacagagcgagtctgggttacccagaaactgaacattccaaagaaaggctcagcccttccctatacctggcaggtaacttctaaaccaagcttgtccaacctgcggaccatggggtgcacatggcccaggagggctttgttttgttgttgttggtggtggtgcacacagcccaggagggctttgttttgttgttgttgttgttgtttttgttgtttgagatggagtttcactctgttgcccaggctggagtgcaggggcacaatctcagctcactgcaacctccaactctcaagttcaagcgattctcccacattcgagcaattctcctacttcagcctcccaagtagctgagattacaggcatgtgccaccatgcccagatagttttttgtatttttagtagagacggggtttcaccatattggcaagcctggtctggaactactgacctcaagtgatctgcccacttcagcctcccaaagtgctgggattacaggcataagccactgtgcctggcctccaggagggctttgaatgcaaaacaaatttgtaaactttcttaaaacattatgagattttttgagttttttttcttttttctttaagctcatcagctattgttagtgttagtatattttatgtgtggcccaagacaattcttcttccagtgtggcccagggaagccaaaagactgcacactcctactctaagccgttggaatatattgtccgatgagggtctttgtttactgggagccttgggtcacacaagatcgtctatgctaacaatgtatgatggaagccttgggccacactgtagttatggtggcctctgaaagggctgaagaataaggtcagccactcatgtgctcagcctcacccatataactaaagccaaataaaaaccctggacacccaggctcaagtgggcttcctgtactggcaatacatcatgcctgtcgtcacacatcatggctaggacaatcaaacattgtccatatgactccacagagagaggaaaactcaaagcttctgcacagcatctcccaaaccctgccctacacacctttctctgtttctgattttaactgtatccagtctatgtaataaaataaaatcatgaatatgacagttttgctgagctctgtgttattctaacaaattattgaacctgaggaaccccagatcttgcgatccccagaacatacaagccatcaccatgtctcacttcctgactcagtgaatccatgcagatcataaaagtaaattcacatctctaggtcttgggctggcttgctatatagcaacagattacttggaatagggaaacagtcataacaacattttagtccatgatgggttgcacacacaatggtggtcccttaagattataatggagctgccaacaaacatatgaaaaaaagcttatcatcactggtcattagagaaatgcaaatcaaaaccacaatgagataccatctcatgccagttagaatggcaatcatcaaaaagtcaggaaacaacagatgctggagaggatgtggagaaataggagcactttaacactgttggtgggagtgtaaattagttcaaccatgtggaagacagtgtagcaattcctcaaggatctagaactagaaataccatttgacccagcaatcccattactgggtatatacccaaaggattacgaatcattctactataaagactcatgcacacatatgtttattgcagcactgttcacaatagcaaagacttggaaccaacccaaatgcccatcaatgatagactggataaagaaaatgtggcacatatacaccatggaatactatgcagccataaaaaaggatgagttcatgtcctttgcagggacatggatgaagctggaaaccatcactctcagcaaactaacacaggaacagaaaaccaaacagcacatgttcttactcataagtggcagttgaacagtgagaacatatggacaaagggaggggaacatcacacaccggggcctgttgggggttgtggggctagggaagggatagcattaggagaaatacctaatgttggtgatgggttgatgggtgcagcaaaacaccatggcacatgtatacctatgtaacaaaactgcacgttctgcacatgtaccccagaacttaaagtatatattaaaaaaaaagattataatggagctgaaaaattcctgccatctagagacgtggtagccatctcaaggtagtagcatgtgttactcagttgtcagtgatgatgctggtgtagacaaacctactgctcttccagtcatataaaatacaacacataaaatatggatagtatgtaattcttgttaatgatatacatgactatgttaccagtgtaggggaaagaaagatagatcagactgctactgtgtctatgtagaaagaagtagacataagaaactccattttgttctgtactaagaaaaattcttctgccttgagatgctgttaatctgtaaccctagccccaaccctgtgctcacagaaacatgtgctgtgtcgactcatgtccaaggtctaatggatttagggctgtgcaggctgtgctttgttaaaaagtgtttgcaggcagtatgcttggtaaaagtcatcaccattctccagtctcgagtacccagggacacaatgcattgcagaaggccacaaggacctctgcccaagaaagcctgggtattgtccaaagtttctccctgctgagacagcctgagatatggactcatgggaagggaaagacctgactatcccccaacacaacacccataaagagtctgtgcctaggaagattagtaaaagaggaaggcctctttgcagttaagataagaagagggcatctgtctcctgctcatccctgggaatggaatgtctcagtttaaaacccaattgtacattctatttactgagataggagaaaactgccttatggctggaggtgagacatgctggcagcaatactgctctatactacactgagatgcttgtgtaaagtcaaacataaatctggcctacgtgcacatcaaggcacagcacctttccttatttatgacacagagaactttgttcacatattttcctgctgaccctctccccaccattaccctatagtcctgccacatccccctcaccgagatggtagagatagtgatcaatgaatactgaggaaactcagagaccagtgctggcaggagtccttcgtatgctgagtgctggtcccctgggcccactgttctttctctatactttgtcagtgtgtcttatttcttttctcagtctctcatcccaccagatgagaaatacccacaggtgtggagaggctggcccccttcataaggttgttgagatttatctatgttggtgcatgcatctatgatttgttttttattattgttcagtagtattccagggtatgattacactgcaatttgcttatacattcatgtactgatggacacttggactgtttcctgttcagggtattatgcataaaggtgctaagaacattcttgtgagtctttgtgaggacatatcatttcattactgttgtataagtatctaggagtggaattcctgagtcataagattcttgcttttattttgcaattctcctaaggagtcatatagttctgtaaagcttttcactcttcacagatttgatattttaagtaacacggtatgtttctgaaatggagtttgcattttggggcattttctatagatgtatcatgaaggacacgtgaaaactctgttataaatataaacactccactgcatgcaggaatttccttctcattcttccaatggaattgtcttaatttaggttggatcagaattagaatttacgttatgatgactatgtaaataatatttataggtcagtcaggtagtatcctatgattacttttcttgcacaacttttttttttcttttttctttttttcctcatgaaggggttgccaaggctgtgtagtgcagtggctattgataggtgcgatcatagctcactgcagcctggaactcctgggctcaagcgatcttcctgccttggtctccccagtagctgggactacacgtgtgcgccatcgcgcccgggcttgcacaacttttcattctcccagagtcgccttatttattccttccagaattttaggcacttggttctccgaaagccccgacgttaagattgactccacctacagcagagggaaggcccttcttctctcttaaggaaaattcccgcctcccgcattggattccttttccggttggctggtggctgctctctttacctgcactgggcggtgaccgtgtccctcaaatgtaaatgaggttccaggggtcgctgttttttcactttccgttgacggggtgaacaatatcctcgtacctcgattgcctctccacacccttttggtcctcaaaaatcttcctcttgtcctccacatgtagctagatgcgttttcgcggtatatgactcagggtgcgattgctctttttcctctgtggagaaagcgttttcacttgtacggacacctaagtgttaagatggccgcgcccattgtgtcattcccgtcattctttgtgcaaagcggatgacttttctccccagcccgctaaggtgcacgtagccataccatgtttgtcttggctaagctcgaccctctgaaaataaatgaaacttgggcgcaggatttaggtgccaaaatatggagttcttcaccgtcccgcgctatccctgaatacttgggcagaaaaggtccactttaccttccgtacgtgcaggattcaaagatggctgcctccagtatccgtgacgagaggacgcgaacttactacctcccagtcgtccgtgctccgtacacctgcaacttcagaccttcctcggccgccgtaggccggcttggaggctgggggagggcccagaagtggaataattcaggaaagtgcaggttctgggaagtctcggtgggttccccgcaaaatcaggtctgtgtgtgggtctgtctgtcaggatgaggggaggagggtgtctgtgggcgtccgtttagtgcggagccgtggagtttgtgggggaagcgggagcaagtgggagtcggggtattggggttggggcgtctccggagtcagccctgagggatcccagtggtcggtggtcagagtctgtccagagcaacacttggaagtccgtgatcagggtttggtgcctttgcgggtcactctgtagggctcggtgattgaggactggagtgaggagtggtttttgtcaaggaaaactgtgtctgcttcggattcggggttttattttttatttttgagacagggtctcgctctgtcacacaggcttgagtgcagtggcgcaatcgtggctcactgcagcctccatctcccggggctcaggtgattttcccacctcagctttcccgagtagctgggactacaggtgagcgccaccacgctatctatctatctatctatctatctaatctgtctaatctaatctatctatctatctatctatctatctaatttatctatctaatctatctgtttattgcagagacgggggtctcactatgttgcccaggctggtctccaactcctggcctcaaacgatcctctcaccttggcctcccaaagtgctgggattacgggcgtgagccttcgctccaggctgtaatcaggatttaatatgcgactcagtgaggaggagcccgggttcatgtgaacctaggtgtgtggtccaggtttttggattaatctaagggggtgtgaccatgttagggaggtctagatgtgacagtcgtggagaagcttgtgaaggctgaagccttggcagccagggcatcctgattggtgtgtgtgttcaggtccaacggtacattccctctcagtcccttttaagtttctctgcaaggactggtttacaaatctcatttgacttctcacatctctcctttctctcatcctggtaaataggaaagctttggggaagatcaaagattaatcaaatctaaaatggtaaggtggcctggcgcggtggctcacgcctatattcccagcatttgggaggccaaagtgggcgaattgctcgagcctagaagttggagatcagcctgaacaacatagcctgtctctccaaaaaatacaaatattaactgggtgtggtaacacacgcctgtagtctcagctactcgggaggctgaggtgggacgatcacgtgaccccgggagttctaggctgcagtgaactatgattgagcactgcactccagcctgggcaacagagtgagaccctgcctcaaaaaaaaaaaaaaaagaaaagaaaaggagaaaagaaaaaggaaaaaacaaaacgaagaaaatgataaggtttctattaaagattttcgttcttcttcctcaggtttactgtgtgaatgtgtgtatacacacacgtaaatattttctttcaggttctgacacaagtaaaacatctctcttatcccaaaatgtgttccccagtaatgacttttgataagatttttgtatatttcaatttcagttttctatgcttgattttcacaatgcagataagctgctgaaacattggtataatttgccgtatttaattttacattatgaacgttcttatagtaaacatatcatccatgtttttgtttaaaaatttttttttaagatttctgtaatagtataccatcaagaggcaaaactgcaccactgtgacttgaatcactaagtgtatggatatatttagatagaattttaagacttaaaaagttcacttatcacttttaagaatgggttacaattctatgtttacccaaacatgtttctccctgaccctcatcagcaccttagtttttaatttttttgcaattgtaaatggtgtgtttttaattttgacctttctgttctcttctaatttactcttacatagaagagcaattagtttagaaaatatttacattgtttttggtcaccttactgaacaaacttccctgttctccaggttacaaaaactttcaaacatataacatgatttaaagaactttacaattgaatacctgtttgcctaccatctggattttatcatcattttattgtgtttcttttattacatatctatctatatatcatccttctactcatcattaatccacctttttttctttttatagagatggcatctcactatgttgcccaggctgatcttgaactcctgacctcaagtgatcctctctccttggcctcctaaagtgctgggattccaggtgtgagccacttcacccagccacatttatccatcttgtaaaatattgctttgttttttggtgcatttcaaagtaagttgcagacattcatacatttgcccctgaatatttcagtaggtttatcataattaagttctactgacagcttttcctaattacaggtctattagtcccatactgtataattcagtggcttttactatgtgcggccatcaccaaagtcaactttagaacattttcatcacttaaaaagaaaccctgtacccttttgttaccactccctatgccctaccactaagtaatctctaatctactttctgtctctatagatttgcttattttgacctttctgttttcttctaatttactcttatttcatttcatgtaaacgctacaatataatatgtgatcttttgtgactggtttctttcacatagcataatttttttttttttgagacagagtcttactctgtcacccaggctagaatgcagtggcgtgatctcagctcactgcaaccaccacctcccaagttcaagtgattctcctgcctcagcctcccaagtagctgagattacaggtgcctgctaccatgcatggctaatttttgtatttttggtagagacggggttttgccacgttggccaggctggtctcaaactcctgacctcagctgatccgcccacctcagcctcccaaagtgctgagattacaggcgtgagccactgcgcccagccaacatagtataatgttttcaaggtttgtctgtgtcgtagcatgtatctgtacttcattcttttttatgccagaatagtatttcatggtatggatatggcatcttgtatttatcctttcatcagttgatggacttttgggttatttcccctttttggctattataaataatatgctataaacatttgtgtgtaagtttttattgtttttatttctcttatatataagcctagaaatggagttgttgggttatatggtatgtttagccatttgagggactaccagacttttccaaagtggctgcaccatttaacatttccgccagcgatatttgagggtgtccattgccaccatgtacctaccaacacttgttatttttagttttttattacaggcattctagtgggtgttaggtggtttctcatggttttgatttgcatttctctggagacttatgttgagccatttttcatgtacttatgatatacataactgaggtacatgtatttttactaaatatggaattgttagtatttttaatagctagatagctccatttctggatgtgtgtacttctaatcagccagttaatcctgttaatagacctaaatcctttacgtcaactttgcatgcatgtgtcgctatttcctttacaaaaatttccaaggtggatttttgggttctagtaatatctcaaatggaagtattcaatgcaaagtgttatttccaaaattgtttagtcacttaatactgataaaaaagtatgtctattttggaatgcttgcaacttttagatataaaatcatcaatctgactaaaaacttattttttgtatatgttcaattgaatctataaaactgtcactcttccttagtcatataatttatttcctcttctctaatattgattatttatacttgattctttatcaaactaactgggtagcctttccagaatagttaaaatagtgataatcatcctgttcatcttcgatattgctcttgactttagagaatgtacttttatagtttcatagaacttttttttcttcattcctagaacttctgtaggatgtatttaattttttaaaatgaggtaaaattcacaagacataaaattaatcattttaaagtcaacagtgcaatcgttcttagtacagtcacagtgttgtacaaccaccacttgcagccacttcacattctcccctccagtagaccctggcaaccaactatgtgctttccgtctctttttgtagagtgcccgattctgtcgctgtttggggcgccagttgtaactgaccatgattcctggtagactgaacaaagcggggcaaacgagggaataaaagacaaaaacaaaagagtatatttggaagaaggggtcagggggcaccttgcctctagtggataagggctctgagctttacacagctctccgtatttattaggcaaaagagatagagagaagggggggtgattgtcgagtaattgtcagtcggccttttggttcacagcaggcttgtgagattgcattccttgagcaatagcctctagatgtccccatagatagcctccaggagcccagcgccagggaatggtggccctcagcaaagctggggcaggtacagaagcgagtttgcccacattctgtactcgtgataaacagtttgctgtttgatcatgtactctccagtggaatgctgagttggtcacgatccctttggccttttcggctcccaacatcttttttttttttttttttttttttgagacagagtttcactcttgttgccctggctagagtgcaatggcttgatctcagctcactgcagcctctgcctcccgggttcaagcaattctcctgcctctgctaggattacgggcatgcgccaccatgcctggctaattttgtattttttgtagagaccgggtttctccatgttggtcgggctagtctcgaactcccgatctcaggtgatctgcccgcctcggcctcccaaagtcctgggattacaggcgtgagccaccgcaccaggccagtgtgctgtctgtatgcatttacctaatctgggtattttatataaatgaaatcatataacgtgacatttagtgtctgacattttctttttttttttgagacagggtctcactctattgcccaggctggagcgcattggcacactcttggctcactgcaaactctgcctcctgggctcaagcaattctcatacctcagccaccctaacagctgggattataggcatgcaccaccatgcctggctaatttttgaactttttgtagagatggggtttcctcatgttgccctggctggtcaagagtttatcttgagctcaaagcaatcctcctgccttggcctcccaaagtgctaggattacaggtgtgagccaccacgcctgagtgtctgacattttcacttagcataatgtttttgtggttgtggattgtgtgctgggctactcctttaatgattagccagggaatctataaacctgccttaccgttcacttcctgcttgcactgaacctgtagacatcagccagaaggaacgttttagagtcttcttaggtcttttctcagccaacatcctcccctgtgcatgcgtgtggcttttatatattcctcagtctatacgagtgcttttgaatggtataatttcctcaagacactttcctcctacctttttctcacaacctttcctctgtgactcaagtgtaatcttttgccccaggcagctgaaggttgttgttctgcttcacaaagtgtttgagaaatgcccattacttttcctccctgagtgaattccaaaacaggaaggggcctgttgcataggtccttcaggtagttagaatagacaacaaacaatttttttatttttatttttgagacagggtctcactctgtcacctaggctggagtacagtgacgagatcatggctcaccacagactcaaactcctgggctcaagtgatcctcccacctcagcctcccaaagtgctggtattacaggcatgagccactgcactcagctaaacaaaattatttgtgaataaagtctattctgttccctccagggcctgaatccaggttcccacgttgggaatgttggccacaatctttaagaccatcactgagctggggagggggtggagcaaagacagataaaaatggcacagaactttcctactatttttaagtcaccattttgttgttgttgttcttgtttgttttgtttctttgagatggagtctagctctgtcacccagactggagtgcagtggtgtgatctcagctcactgcaacctccacctgccaggttcaaatgattctcctgcctcagcctcttgagtagctgggactacagacatgtgccaccacacctggctactttttgtagttttagtagagatggggtttcaccatgttggcctggctggtcttgaacttctggcctcaagtgatcctctggcctcagcctcccaaagtgctgggattataggcaagcatgagccaccatgcccggccagtcaccttttttttgactcaatatttgttctgttgttgtaaacctttgactatttttcagagttctgaccaagtttttgttttttgattgtttttacttgattttttgatagtttttttacttgagtttttgatttttcgatagagggacggacccttggacctacctactctgccatttttactcaatgagattttcctccacagtatatatgcttttgttttttttgttgttggtacttttaaaaaagaaataaactgatgcaagtgcaccttcagtgatatcctctaatccaccccctttcctctcctccatccctagggataactattcccttgaactaatttcatataatgcatgttttattaaatgtgtacatattgaaaaataatacatagtcttattttatgttttttaattttttaaatatacttttctttgttgtttctttcatatgatgatgatttgtgaacacgtcctgtttggtagtgatgctttagaatttatggaaattttctttatggcttcctatacatacatgagttttcaggaaatatactcctccagggaaaggacttagccactggagcaaacaggcgtgattacattctccagaaagctcataagggtcaaaaatgaagtagaagctcttcagctattcctgggaaaggggctgtggaagctcatgggaaaggaagccttgctgtttgaaatacacaccctggatgtcactgaaatgttgcatccaccacctcctgcccaggaatgttagatcatttgggttctgcacctttccactagtggcgttctaagaagaaaagtgtgaaacatctcttgccacaattacgtgcttctgagattgcagagggaaggggagcatttgcagctgtgggttaaaggatgagtcagtgcagaccctgtgggtttggagcatgcaggagggccaccgggagcttgtcacaatgattccacccaggtggaaggaaagcttagggtgactccatccagttgatgctctcaccatgtgagcctcttacttgagttttagaattgggcataaaaaaagcctctggggccgccactctctgacctgctgctttcaggccaagggtgtagcgtgcagtttttccatttgtctttgtgcctgtgtcactgttggcagtgctgatttcagaaggtcagattatatgtctatgacagtggccatcttccatgatgaatgaaactccctcaaggtagtagcaaagagagctaagatgtatgatgatggtatgcagtccaaaggtattcagcagaggctaaggtcatgttcttggagacaggctgtgtgggttcagattctacttctgcttttggacaatatagtcaaatctgtaagccttaggtcaatgttggaatgggaaataatgattgatactttataaggatgtaacgcagaaggtagtaatgagaattcaaatacaacaacccctctgcttggcttaatacatttgtcttcaaactgaggcatgcctacatgtgaggtgtatgatgacttttgaccaggcatgtggacacacgtggttttaaagaaataaatatccaattcctcaccttctctgtcctttttctaaaacctgatctaagaagtttcttggtgttgcagcatcatgttggtgctggttctcctttcccatctcccctctcacagtcacctcacttacatttcacagaagaaagacagtttgtaaatgtattggccatacctgtagaatcttatgttttgttgctccaggatttgttgttgccccagggtgggttaaaacttctggggccccaaataaagggacagttagagatggccttgcattaaggtgagaacacagcagcagtgacagcacctgggcctgcagggaatgtacactcaaatcaatttactcttcagcccacaggtcctgacttcaggagcaagacacttcaagtgaggtgaggaggaggttccaggacctggataccatcctttgcagggatgtaattcaccagagaccaagatttctagccagaaattgagggcagctcaaggagagactacagacacagcatcctacttactggctatttcccagtaacaaaagaaaatgatcaagtcccaggtgactttttgtttgttttagtctttccttcatcacatgattgatttctggaagactttaaaagtcagttgaattaagtcaaaaagtataatttggtaaactaggatttgtgcatcagtaaatttagattgtaatttcaacatctaggcaaagtaggatcaggactatattgtttacatgtggtatcatagaaagatacttggtctttgtctggcatagagctcctaaaacccttggaatttcctgaatgataagggtcttttttttgtttgagacagggtctcactttgtcacccaggctggagtgcagtggtgcaatcttggctcactgcaacctcggcctcctgggctcaagcgatcatcccatctcagcctcctaactagctgggagtgtgtgccaccaggcccagctaactttttgtatttttttgtagagatggggtttcaccatgttgcacaggctggtctctaactcctgagctgaagcaatctgtctcccttggcctcccaaagttctgggactacagttgtgagccactatgcctggtcctctttttttgtagtgaaactactctcagtggacccctaggtagcttcagtatggaggctggttgccagaaataacaagccttgattagaagcttggaactttcagtactacctctaatctccagggagcagagagaggctggagattgagttcagtcaccagtggccaatgatttattcaaccatgcctgtgtaacataaaaacccctaaacagcagggtttggagagctgggttggtaaacacattgaggtgctgggaggttggtgtgtgcagagagagcatggaaatttatgcccatacaccaccatactgtgccctgtgcagcttttccattgggttattcctgggttgtaaataaaccagtaatagtaaagtgctttcctgagctctgtgagttgttctagtagattattgaacctcaaggtgggttgcagaaatccccacatttgtagccaagggacaaaagtctttgtaacctggggacctcacacttgtgactggtgtctgaagtgaggttggtcttgtgggattgaaaccttaacctatgggtcttccaggagttggtgtcagaattgaatctaatcgttggacacctattgggtgttagagaattggagaattggttgatgtgagcaaaaacccacacatttggtgtcagaaatgtgagtaaaaacagcacaatggaattcacacaaaatgactaatgttggaacctaatgtgtgaccggagcatcctgtgggttatagtagctgtcaccttctgtctaatgtctctgactgtcatcacatccagagagtccttggtcacaggatatgcactgactctcaggagaaagcagaccagttcccgagaggtgtcactattaaatgcacttaggtcccaggacagtttttagatggttcttcctagaggtggtgtgacagatgatgtcttttttcttttttttttttttttttttttgagatagagtctcactctgtcatccagattggagtgcagtagtgccatcttggcctaccacaacctctgcctcccaggctgaagtgattctcctgcctcagcctcccgagtagctgagattacaggcatgcactacgactgcccggctaatttttgtatttttagtagagacagggtttcaccatgttggccaggctggtcttgaactcctgacctcaaatgatcctcccacctcggcctcccaaagtgttgagattacaggcatgagccaccacgcctggccccgaatataaatgccataagcccagccttctcatacatgccaaagcacaggtcctcagagacctttttgggaagaggccaaaggaactcagaggacacagttcaggggtccaaggcaaggttacccaaggacccagtcttatggctggtagggtcatccaggaataaaacctgaaaggctgaggaaaatggaaagattgcacaactttctttttttattctttttctaaatttttttttcatttttcttctttttcttttcttttgagtttcacattgtcacccaggctggagtgcagtggtgtgaacatggctcactgcaacctcgatttcctgggctcaagagatccttctgcttcagcccctcaagtagctaggcatgtgccaccacatccagctgatggttgtattttttgtagagatggggttttgccatgttgcccaggctgggattgcatgactttctaaggttctctgtatgaacaggtggctgacttactgtttgagacaggattggcagtagggagttgaaagtactgttgtctggtaagggaatgggttgttgggatccagagggtttgctttacaacatccccctgtgtaagattgtgcacattctttttccatgttcaaagccagttcttacaccctcatcctttaatacgttaaaaaaagtaagtatataaatgtacatggatatatatatatatatatatatatatgtgcaatatgctgtataggtttatagtctgggagcaataggctataccgtagagcctgggcatgtagtaggctgtatcatctaggtttaagtaagtgcactctgtgatggatgaacaacagaattgcctaatgatgcatttctcagaatgtatccttgttattaaatgacacatgaataaataaatatacatgtatacatgtttgcatatatttgtatgtatgtatatatatgtatatatatttacagacgtatctgccttagcccttagatctttggatagtacctttccattattgtattttctctttcacaaactaaattggtacatgctagaccttacctatcctctgtatttattaatctggtcttttatatattgcatcattctgtccttttgttgcatttttggtagttttttcagatctacttaccagttcattgactatctcttcagttatgctgcttacacgcctgataacataaatataaatacttcaaaacccatatgtgtgtgtatggtttttgaataatattttgtattttcttttttattatttatttatttattttatttttatttatgtatttattttgagatgaagtctcgctctgtcactcaggctggagtacagtagcatgatcttggctcactgcaacctttgcctcctgggttcaagtgattctcctgcctcagtctcccgagtagctgggattacaggcatgcaccaccatgcctggctaatttttgtatttttagtaaagatagggatttcaccatgttgggcaagctggtctcaaactcctgacctcaggtgatccgcccgcctaggcctcccaaagtgctgggattacaggtgtgagccaccatgcctggcctatttatttattttgtaagccagtcacatttagcagtagggggtaataatacttaattgtctcttgttctttggacatgttttggaaagagtcttttactcctcctaacatataaaatatacttatttattatgtagtatcttgtagtgtttggggtttcttcctggttgattctggtagcgcacatgaagattcattgaagattcatgatgaataaagaagtatgctttattcatcctgatattgctaaaatatatttagtgcctggcaaataggtgctcaaaaaaaaaaagaggattagcaagaggattaaatgattggttcttatagaaacttctgatttgttaaatgatagataattacacaattacagaatattttgctagagatagattttgaatatagatagattttggagatggatttttgcctctatgacaatgtatttttttaaaaatcacagcacctagatatatagatgcagactatttggtaaaaatgagcagaacaatgttcttcacatttcttccatataaatgagagaaatacttcatattaagcaggactctcttattacaggaatcactgaccctggaggatgtggctgtggagttcacttgggaggagtggcagctcctcggccctgctcagaaggacctgtaccgagacgtgatgttggagaactatagcaacctcgtgtcagtgggtgaggacagctgccctgtgtcactcagagagtacccagtcaaaggcctttgctttctcagctttcaaaagctctggagggcctgtggtgctctgaagtggtagattctgtaccctctctggccccagataaaagagtgtaatgtgccccctttagagggaaaatccctttgctttgcagacacataaattacatagttcctaaaacagaacatggtcccatgttgatagaccacagctcaattcaatgagcctaagttgtgtatcatttcctatgaacagggtatcaagccagcaaaccagatgcactcttcaagttggaacaaggagagccatggacagtagaaaatgaaatccacagccaaatctgtccaggtgagttcagggtgagagccagcaaggagggtggctgagcaagtcacatgatagttgttcagcagtgtctgagctgtcagggcatctgaggctgtgtggacagagcctccatgtatccctctccccacacaaaagctctttctccttcgggtatttagaggaacatctgcttcgttatcgcgtcttggatttcatcactgtttattttttatttattttattttatttatttattttttgagatggagtctcactctgtcacccaggctagagcccagtggtgcaatcttggctcactgcatcctctacctcccagttcaagcgattctcctgcctctgtcttcccagtagctgggatcacaggcacccgccactacgcccagctaatttttttgtattttcagtggagacggggtttcaccaagttgaccaagatggtctcaaactcctgacctctggtgatccacctgctttggcctcccaaagtgctgggattacaggtgtgagccaccacacccggcctcatcactctttatttaatctaggtttgatttgtttttctcaaggtttcttcctttttaggattctcaaatctcatcatttcttgttcccccatcagagcatcactacctgttccttctacttctcttgctatgaaattcctccttccatgtctgtctccaaagagtggtcttggatatcagcactctctcctgaccactatacctttctgcccctttagataatgttgattttttttttccaaaggtcttcccaccctatcttggactctgtgcccccttagtaacctggtctgttgctttgcatatatttgcttccttagcttctcttttttctcccactctgaggtcctccagaggttctgtttcccatttattttgctctgttctcatatcctttaaaagtttccttcattctaatgacttaagttcttgttctctatggagattctcagattgacatctcccttaatatttcctaacttacatgtttgtacctattttttacccacttgcatgtcaactccttgagtcgatcctggccaccacagggttaccttgaaacttccctgcctcctcagctaccgtatttaaagtctttgctctttcaattgatttttgaagtagtctcattctctttccaacccaaaccagattactacacctcatgcctgctttgcttcaatttccttttggaatcattaattctgcctattatttagtttctcttaaattatattgctggacttattcccttaaagcttttctgttcttaccatagtctgatggcactgagtcccagtgaatcatagcagtcatataagatggaaatttctcatctgtcaggtgatattctagttgaatcaccatgatatggtatcatcttgcctacacagagtttgttttccttttccttttcataaattcaaagccaactatatataaagcactacatttgaagtagtttccgcagtgtgtcccttactttccttgtttcattgccttaaatattttttgatagactattacatatgggccctgacagctgtgaacatcaataacaacaacaaaattcttcttggagattacctgctaaaaggaagaggcacaaaattaatcaaaatggataaatgtcttgtggtgaaaaatgctgggaagaccaataacaaagtataatgagggatgccgggagtgggaatggctgtttggtcagatgcctttgagcagctgtatgacagacatgaatacgtccccctggtgaattaccttccaagtagacaaaatagcaggtccaaaggcccaaggcaggtgtgtgtttgaggaacttcaaggaagcctgtgtgaatacagaggagtgaacaagaggggcagtggtcggagataatacggaagtaaggacagtgtggtgggatctggagtttggggtagacaggtcatgtatgacctttcaaggacattttaatgacttgatttttttttttttttttggcacagagtctctctctgtctccaggctggagtgcagtgctgtgatctcagctcactgcaacctctgcctccctggttcaagcgattctcctgcttcagcctcccaagtcgctgggactacaggcgtaagccaccgctcctggctactttttgtatttttagtagagacagagtttcaccatgttggccaggatggtcttgatctcctgacctcatgatccacgtgcctcggcctcccaaagtgctgggattacaggcgtgagccactgcatccggccatgacttgattttttaaaaaattatgagatgaggaaacatgagggagttttgagtagaagagtgacatgatgtcatttatatttaaaaggatcactttgactactttgtagaaagtatacaggagaaggcagaggttgaagcctgaagtccacttgggaggctattgctatagtaccagaaagagtgattctcttccatctaggtagaaggggtgagtgttagtgagtttcagaatacaggagtcccctgttatccacagtttctctttctacagtttcagctacctgtggtcaactatggtctgaaaatgttaaatgggaaattctagaaataaacaattcttaattacattgctcaccattccaaggagcatgaaatcttgcaccatcttgctccatcctggaacaggaatcattttttgtccagcatatgcatgctgtgtaccctacccacctgtgtcacttagtagccatcttggttatcagatcaactgtcaaggtatcacagtgcttgtgttcaagtaacctttgttttacttaataatgcttccaaagctcaagagtgtgatgctggcctattgttataattcttctattttattatttgttattgttaatctcttgctgtgcctagtttgtaaactttattataggtatgtatgcactgtacaggaaaaaacataatggatatagggttaagtatgattcagagtttcaggcatccatggtgtggggggtgtcttggaacatatcgcccatagatgagggattactgtatatttataaaagacataaggaatttactactgaagtagacaaagggtgtgagacaaacatacaaatgaaagatgatagtaaggtttctggcatgagtccgagcaggaattaacttgccatttcctgagaaatttaccttgtttatacactgactgcttttattttttgttttctttgtttaaattataatggtttattcttgtccaagtgacaataggcatatctacttggagttttttaaacagtggaaatagtgtggtcagtagagccagcctgtacaagactgtttgtgaaatagttctattccatgctcatggaaagatttattgttctcttctttcctagaaatcaagaaagttgacaatcatctacagatgcactcacaaaagcaaagatgtctgaagagagtggaacaatgccataaacataatgcatttggaaacatcattcatcagaggaaaagtgattttcctttaaggcaaaatcatgatacatttgacttacatgggaaaatactgaaatcaaatttaagtttagtcaaccagaacaaaaggtatgaaatcaagaattctgtgggggttaatggagatgggaaatccttccttcatgccaagcatgaacaatttcataatgaaatgaacttccccgaaggtggaaattctgtgaatacaaattcacaattcattaagcatcagcgaactcaaaacatagataaaccccatgtatgcactgagtgtgggaaggctttcctcaagaagtctcgcctcatctatcatcagagagttcacactggggagaaacctcatggatgcagtatatgtgggaaagccttctccagaaagtccgggctcactgaacaccagagaaaccacacaggagagaaaccctatgaatgcactgaatgtgacaaagcattccgctggaaatcacagctcaatgcacaccagaaaattcatacaggagagaagtcatatatatgcagtgattgtggaaaaggcttcatcaagaagtctcggctcattaatcatcagagagttcatacaggagagaaaccacatggatgcagcctgtgtgggaaggccttctccaaaaggtccaggctcactgaacaccagagaactcatacaggagagaaaccctatgaatgcactgaatgtgacaaagcattccgctggaaatcacagctcaatgcacatcagaaagctcacacaggagagaagtcatatatatgccgtgattgtggaaaaggcttcattcagaagggaaatctcattgtacatcagcgaattcatactggagaaaaaccctatatatgcaatgaatgtggaaaaggcttcatccaaaagggcaacctccttattcatcgacgtactcacactggagagaaaccctatgtatgcaatgaatgtgggaaaggcttcagccagaagacatgtttaatatcccatcagagatttcacacaggaaagacaccctttgtatgtactgagtgtggaaaatcctgctcacacaagtcaggtctcattaaccaccagagaattcacacaggagagaaaccctatacatgcagtgactgtgggaaagctttcagagataaatcatgtctcaacagacatcggagaactcatacaggggagagaccgtatggatgctctgattgtgggaaagctttctcccacttgtcatgccttgtttatcataagggaatgctgcatgcaagagagaaatgtgtaggttcagtcaaattggaaaatccttgctcagagagtcatagcttatcacatacacgtgatctcatacaggataaagactctgttaacatggtgactctgcagatgccttctgtggcagctcagacctcattaactaacagtgcgttccaagcagagagcaaagtagccattgtgagccagcctgttgccagaagttcagtctcagcagatagtagaatttgcacagaataaaaaccatatgaatgcagtgaatgtggtagtgctttcagtgatcaattacatcatatgtcacaaaaaacacagaggaacaaactgatatattcaaggtggaaagcccttgaataaaaccttatggctaataagcatatactcagagaaaaatagtatgaagtggagactgggaaattcttttatgggaagatagatcttctcatcagtgaccatagatcacatcttcagtgagcttatagttggtagaaatataatgatcatggaaaagtccttgttcagaaacagtacgccagtaggtatcagggggtttacacaggagagaaacttttggaagacctttgaaggctatgaatgtggcagggttgctagtggtacattctgccttatcctcagagggaatcatatagaaataaaactatgaaaatgtaactagaacatcttcatcaaaatatgaaagaacacacgaagcaaataagccctgtgaaaaggagtattttagagatttcgatcagaaatctaacatcattatatggcagataatatacaggatgtgtattttaggacaatataccttgaatcactagttgatatgtcaatgactaattaaaaggggttgtcagtgttacacatcattggttaaatttatagcacaatgtacctcttcccccttttttgataagagtcttctattcccaaccaagatcattatatgattagctcttgtgtttctttgattccaaatttcttcacttgttatttcagactactgaagctcttcaaaaggaaaaatgtatttaatttaataatgtaacacaacaagtttggatgtgtttaactttataaataatcaccccagaggaatgaagttcaaaacttgtgaataaccaattggccatgctcttaatttagaaggtagtcctcatcctaaccctgtggtttgtcttattgttggcataagcaccattcagaatagtttgaatgatctattttctttacctgaaactatttcctttatctaggaaccgtggatgatggcagtgggaaacaaagcaaaattgcaagccagcatttttaaaaagctggattatatgcatgtagctattttaccctccagcagctgtagttaaaaaatgcatatgcctatatcagttgaaagagacatacaatataagatcaaattgtcctgataatttcttattcaagggacatatttggagtgggaaggggaaaggactcaattttccttacataaaacaggatatgaatacttttctaaaaagtgttcatgtcttctctctacctaaattataaattccttgatagtttgtaggcaattgtatataccctagcagataccaaaatagaaattaattatatgtagatttggaagatgaatgaaggtgcatgaataacccagtggacaattatcaaaattacttttgccattgaaggaaaggaactactggcaagaacttctaaggattagtattattctaaaaaaaactttaaaaaaatctgaatagagactcatttctgtcataagaggggcagaagagagaaggaataggattcacagaataagcccaataaaagaacaaaataacttcattctctaaaaataaaggacagcatgtaagatgggtaaaggtgagatccttttggatatcttggataagaacccttaaatttatctacagacctgtcaccttggagagctgctactgttttaaagatcctggctcctctgtggtatgctgaattggaacataagatttctcttcatcattccttctcacttggggttaagacccttgtcctctcctatactcagagttccttcccttgatctaataaagatacatccatgttagaaacagtcctgctcacaaggaaaaataaagtggaaatttgccataaagtggctgcctcacagtggaaacccgaagtctgggttatcgggtgattacaacaaatagtttttgagcatctgcactgtggtagacacttgtacacacaggatacactgaagaacaaacataaagtagtggcctgtaacaggatggattcagtacagatgctctacagttaagagtataagaaatgaactcttcttcaacctggacttcagattctctctacttcttgccttgtgaatctgcacatcctatcatagcagtcgtagcatcttactccctgaacacataaatcagggtgcgctactgggcttcccaggcctgtccttgggaccaggtgttgaaatcacctttcagaagttggcatcccagctaaataaatttaactggatactcagttccaggttgcctctttcaaaaggcacatcaccccatgccttcataaaaatggtagccgacatttattaagcatgcggtttgccaaatggtaactgcattatttagtaatttaaaaaaattaaagtttgtttttgtttttgttgtgtttgagacagggtcgtgctctgtcgcccaggctggagtgcagtggcctgatcatggcttactgaagtctggacctcctgggctaaagccatcctcccacctcagcctccagagtggccgggactacaggtgcatgccaccacactctgctaatttttgtatttttgtattttttctgtaaaggcagtgtttcactatatttcccaggctggtctccaactcctgggcataagtgatcctcctgacttagcctcccaaattgctgagattacatgtttgagccatggcacccggcctctttagttatttaacactcttatatgctccatttccatcttcaagtgtttcagggaaatatttgattaaatttgaggcctcattcctttttccttattacaggtaaccacacactgtatgcagttgcacgtgggcattggtcctcatagagatcgctcccgtatttggcctcaagacaattctcggctagactagccttgcccattcttttctgcatccgttgaaggagattcagaacatccacaaatttggtccactctgtgaccgctgtccccctattccccttcagccacttcgcctttggcacaccttgttggtcctgaagaggccctcagaaatactccacattccgccctaaactcccaacagattgtattttctactgaatggaaactgacacctcctaagatgaactgcagccacgatgcttcttcctaacggctcaatatggggtacagcgcgcggccatcttatttttttgctcaggctgttaaaagtttttataattttctgacaatttatccagtttgcgcagtgactgaggtgccctgaaattaattcactgtcttccaacgccgtggtaacagcccttccgggttctctggtgggagtcgccgagatgggcgtggccatgatacgtcacaatacgaggccgagggaggaattctgtcgtctgggaacggctggtttcgcggtcagacgccgagggccctcgaagtccctagcaacggctgcggagggagatgtaagtcgttttggacgcaggctcagtgtttggtcccagcgttcggtggagtccggagagactcaggatcagatgagtcggggtctggatgtggctccaagtgaaaggcctgtgggggtcagtgaaggggagccccctgttctgagaccgtgtgggaccccgcgtcctggggttctttctgggtttactcaatggagaagcctggctttggtgatagggcgcctggcggtcagtaattaagagactggaagatattaacgaccgactgtcaaggtttatggtcgttgagggaatgccgtgggaatcagtggttgagaaacggggtaggaaagtgtgtatcagtgaatgaacttggtgtccattccgggtttgcaatttaatgtgatagagaagcttggggctggagaatgttttagtgaaagaggttttagtttgcggtttcagatttaatttggagtcaatgtttgaggaggcctgtacatgtctgtggtttaggggcctgaagaggctggagctttggaggcccaagggccctggagagtggatgggttgaggcttaataattgactgctggttacagttgtgattaaactacatttacctagtggatctacatgcagttcagttcttcaagtccaagtccgtcttaaaaataacaatgaaaaacatttcccttcctatattcatatcattgtctacaaatttctggacgaggaaattacgagtttgctactaaagtcgagcttttttcctctctagttcccaactttaccatgtcgttttcataaatattttctttcagatttattccaacacaagaaaataatctctgttacccacacttctgatttttatttaggagcattttttttttcgtttcatcctcacagttttcacaattgcaatactttgggtaaatatttgatttcatcacttaaattctcatcacaaacatacatacatgtatgtatatatagtatatatatctatatttctgtctctatatacatctgtctatgtatgtatgtatgtatctatctatctatctatctatctatctatctatctatctatctatctatctttctatacagagagagtcagtcttgccctgtctcccaggctggagtacaatggtgccatcagctcactctaaccttgaactcctgggtttaagggatcctcctgcctcagcctcccaagtagctggactacatataaaatttttcaatggcagtatcacatcagaaggttgtaccagtggcttagtaaatggagtcacattaaatgtttgccttaattaggatggaattgacatgtataaaatattcaattctatttctatattttctatctatatataacattctgatactccaattactcaagttcttctgttcccaccccaagatttgtgattcacttttttatgtcctagatcttatggttacatttattcttaagtggcttatactgttttttttgataattcctctagaagaggaagtcattttttaaaaattgagacagagtctcacaccgttgcccaggctagagtgcagtagtatgatcttggctcactgcaacctccgcctcccagactcaagggattctcccacttcagtagctgggactacaggcactcgccaccatgcccagctaatttttgtattttttgtagaaatgaggtttcaccatgttgcccaggctggtcttgaactcctgagcccaagtgatccacctgatgcattacctgcctcggactccaaagtgctaggattacaggcgtgagcgactgctcctagccaagcgtttcttaaatccaaatatttgctggagtatgcgtacctaatgcatgtatgaaggcctatccctctgagagtctgggttgatagatttggagtacaatccctgcagagtgttgataaaattctctatggaatgctgttgtgacatacttggtaactcacagccctaatatatgctaaaatggatggaattttgtgagaaacaagaaaatatcttctagtagtgatgattttttgtaacaaatatatgaaatatctgtatgtaatacaggatttaaacacaaggtattgttagaattctaggttgtgtgaagttacatgtcaagatgttactgaaatgccaagggttcagtctaggtcccgttgcttgccacacagaaagacaatcactgagacaatgagtattgcgagagaagaaaggcttttttgggtaacatcaggtgggagaggaaaataaatatcaaatctgtctccccacaaccgactaaaattggtggcttatataacaggcaaggaatataaaacaggaattagggaagggtaaggaagaggagttggccaacaggaatcaggtggtcggttaggcaatcatgatggatgaggggtccaccatcgcattgtctagatgcagtgatctggtaagtttcagttccttgaactatctgggaggcctgaatggtttcatgagaaacgaactcagataaaatgaatataagtttcaagctttaagactaggagagtcaatttctatatttattcaaaaagactgttaacatcatttctgtggggaaatccagccagtttaaaaaatgatcagcaaagatagggaatatggtagaaatgtaaaggaaatagaggttaaagtgatatatagagcatagggaatgatggcatgatatgtaaaaggcatgtctaaattttgaataaacataatgaagggcagagaatgaagggattaaatggaaaatttgtcaggccatgagggagaatgccaaaagatttggtccgaagccaaccatatgaaagccaatgttagaaggtgtctgtaggggaagtagtagaatagaaatgtggataagtggggtaatcatagcaacattaacttttattgccaggccgagtggattttgtgttagtaattgaggtagcatggtagagggtaggtttcttttgtatttttctagcctatgggtagtcttatctttcacccagtgacagcaatgatgcaataataaggaacagccagagtttcatatataaataaatatataaattatatatatatatcttttgagatggaatcttgctctttcacccaggctagagtgcaatggtgtgatctcagctcactgcaacctccacctcctgggttcaagcaattctcccaccccagcctccctagtagctgggattacaggcgcccaccaccatgcccagctaattttttgtatttttagtagagatggggcttcaccatgttggccaggttggtctcgaactccagacctcaggtgatccacccgcctcagcctcctaaagtgctgggattacaggcgtgaaccaccaccttacattctggctggggaaaacaaaataaaaacacaaggaaactaaaaaatgaggtagctgcaaattatgagagaaaacacacactgcctatatccaatcagggaaataagcagacacacttgttttaaacaaatatcttgggagaggcaagtcagaatgtcagatttcgacttcaacgtatctgtgacactcttagatggtcatcctgtttttaaaatgcatcccttagggaggtgggggggtcagccccccgcccggccagccgccccgtccgggagatgaggggcgcctctgcccagccgcccctactgggaagtgaggagcccctctgcccggccagccgccccatccgggagggaggtgggggggtcagccccccgcccggccagccgccccgtccgggagggaggtgggggggtcagccccccgcccggccagccgccccgtccgggaggtgaggggcgcctctgcctggccgcccctactgggaagtgaggagcccctctgcccggccaccaccccgtctgggaggtgtacctaacagctcattgagaacgggccatgatgacaatggcggttttgtggaatagaaaggggggaaaggtggggaaaagattgagaaatcggatggttgcggtgtctgtgtagaaagaggtagacatgggagacttttcattttgctctgtactaagaaaaattcttatcctgttgatctgtgaccttacccccaaccctgtgctctctgaaacatgtgctgtgtccactcagggttaaatggattaagggcggtgcaagatgtgctttgttgaacagatgcttgaaggcagcatgctcgttaagagtcatcaccactccctaatctcaagtacccagggacacaaacactgcagaaggccgcagggtcctctgcctaggaaaaccagagacctttgttcacttgtttatctgctgaccttccctccactattgtcctatgaccctgccaaatccccctctgcgagaaacacccaagaatgaacaataaaaaaaaataaaaataaaaataaaatgcatcccttttcttcattctgtatcatcaaactaattttcccaaagcaccaatctcacatttagagagaaacttattctcagtgtccaacctttagcctcactgtgggcacattctcctgtgcttctaaagaaagagggaaagatgagaaacaatgatcatttggaaagtttgcaacaggccaatgaaccatgtagacctctccagaagcagatgtgcttctgaataggataagatgtgttactgaatgggtgctactgctggtgcccacatgtgttgtctgtcaccttcagtcacatttggcatgtagtacctacacagatgtcagatctgaatttttcccatttcattgtccctaatacactgatcccttgtcatgtaactaatagcatcttctataattctacaattatgtcttggttggcatcacaaaaggggcctaagggaccaccttattccttttaaaccaagactcatgccacctttacatatttcttagaaaggaggatatataatggaggaagacaaggctcaccgatgagttcaaaacaaggggacgaagaaagtgaggaattaaggtttgctcctaagtattttgcttgagtcaagagactttttttttgaaagatatatttaacattttacattatgtatataatagtcaaaaagtcttttatctcagtcaatgaatattttatttcagtgaaagggtcttatatatcggggacatctggcctgggatctaggaaacatggaaggaaattaatctgtaataaagtgttagtaattaagaggtcaagctctatgactcagtctccaaagtcaactttcctcaagtcctaataacttttagacgcccccaatatacagactattttcttttaggctcaactttctttacataagacatgtgaatccacacgtctatgccttctacattttagtgcaaggattagtaaaaagtaactaatagagcgctttccagtttggttaaagggagtcctttaaccaaatatcattttagatatcatttccagtagaaaaaaatctcctggctgaagttcatgggttttaagttctttgtttcctgggagttcactataaaaagagtcttttttcaaattatgatttttaggtagttgttttataaagatgtcagaaaaatttaatatgtcttcttttagcattatggatttatactttcctggggatagtttcatgcatctacctgttattatctcaattagggaaaactgatgtctaccaaaaggggtggattttaggttaaggaaaaccagtggaagggcccttggccaagacatgtgaaaagcctgggttaattttgccaattgaattttaattattttgtttatgcattctactaatgcagatgactgagggggatatgcagaatggaagtgttaaagaattggccatattttacgtagtgactgaattacatgggcagtgaaatgagtacctctgcccctatgaagttctagagagactcctcaagtctaaataatttttcaaggagaattttacttaatgttagggctgttgctcttctgcatggaaatgcttctacccaatgaaactatacagactttcattactagaacatacttgtatccttgtgatggggtagtcgaataaaatctgccacacctcaaagggggcctcaggtaaagaaaaatgttcttaggaactatgtaaaggtttccctggattatattttgggcaaatatggcagcaactaaatgctttatgagctatagttgaagaaacttttcaaaatactatttttctcaataaccactttatcagggctccggtgaattaaatcagtccgtagggttgaaaatgatgattgtaattcagtaggaagtataggcaagttgtttagtccacaccatatttcacctttttgttttatattttctaattctgtttttagagctctggattgggttaatttatgtcaaatttgggggcttctttcaaagttaatatgaattgtttttattgcctagatgtatttaggcagtcctcattgtaaccttatgagctagctgacttccttcactttctggagtatctgatttggaattttttggagtatctgatttggattttaataataggtagtgagttttataataatgtttttttaataataaagagataaggtatccattttttatggactggccggaagaggttcaagaccctctttatttattttcacagtattacaaagtcacgaatgacttcaaaggtatatctgttgcctgtatataaattagcagttgttcattttgccaactgacaagctctaattagtgctgtcaatttggcttgttcagcagagattgcttctagaagataagcactttctattttttcccttgggatattataacataacctgcttgtaaatttgagattaatctttaagtaagatctgtctgtaaatcaaaccacaccagtgttactaagatgagtttcttgcaggtttgtcctaggagagaaaagctgaccagttaaggttatgcaatcatgaggcatttcatccaaatttagggggagaagagtagcagaatttaggttattacatgtagacattgtcatatgaggtccagaaagaagtaagacttctaaagggactagcttgctaactaagtaattctgagcatgaagtgaatttagaagtgcttccaggctggcatgctggctcatgcctgtaattctagcactttgggaggccaaggtgggtagattccttgaactcagaagttcaagaccagcctgggcaacatggtgaaaccccatctctacttaaaatacaaaaattagtcaggggtggtggcaggcacctatagtccctgctactcagaggctgaggtgggaggatggcttgagcccaggaggcggaggttgcagtgagccaaaatcacaccactgcagtccagcctgggcaatagagccagaccctgtctcaaaaaaaaaaaaaaaaaaaaaaaagattatgcaatcacgaggcatttcattcaaatttaggggcagtttcatatgaggtgaagaaagaagtaggacttctaaagggaccagcctgctaactaaatatttctgagtatggagtgaatttagaagtgcttccaggctgggtgtggttgcttatgcctataatcctagcacattgcgaggctgaggcaagaggctctcttgagctcgggaatttgagaccagcctgggaaacataaggagacacccctgcctccagaaaaaaaatttaaaacttagccaggcatgttggcatgcacctgaagtcccacctaggtaggaggctgaggtgggaagattgcttgagcccaggaggtttaccagtagggtgattgctgtattaaccccatgcaggctggtagtcctctagccactgaatccaactgctgactgttgtattatataggtctcttttgagccccatgtttttgggtcataatgcctagggtattttcttgatcttcctgtacaaacaacgtaaacaaaataatttggatttcctagtactggggcatctataagatcctttaaattgttcctaacattaattgatttttctctgtccaatccagagagtctgcttgtctcattttaaaagggtatagaaaggtaagcttttaatgaaaaattcagaatctaatttctgcaataattttccagttccagaaatcctcttaggtgttttcttagtttttagggtaagcaaggaaaatatttgttttattctatttgcatcaataaaaaggcttttcttggacaatagataactctaaatattttactcattgtagacagaactcaagattttttattggagaccccatgtctctttgaaagcaatttttgtaacaagtgaatcccatctttttgtagcagctttctcatcttctgaacaaagaaggaaatcatccacatattgtattaaagtatagttttcaaaaatgcagcatataagacatttggtttcaatatttctgagaaataagttggactctgagtatattcctgaggcacaatcatccatgtccattgtttgtctttccatgtgaagccagtagtgtgggggaaagcaagagagatcagactattactatatctatgtagaaagaaaaagacgtaacaaactccattttattccgtactaagaaaaattcttctgccttgagatgctgttaatctgtaaccctagccccaaccttgtgcttgcagagacatgtgctgtgttgactcaaggtttaatggatttagggctgtgcaggacgtgctttgttaaaaatgtgtttgaaggtagtatgcttggtaaaagtcatcgccattctccagtctcaagtacccagggacacaatgcattgcagaaggccacagggacctctgccctagaaagcctgggtattgtccaaggtttctctccactgagacagcctgagatatggcctcatgggaagggaaagacctggccatcccccagcctgacacccataaagggtctgggctgaggaggattcgtgaaagaggaagatctctttgcagttgagataagaggaaggcatctgtctcctgctcatccctgggaatggaatatctcagtgtaaaacttgatcatacattctatttactgagataggagaaaactgccttatggctggaggtgagatatgctgggggcaatactgctctttactgcactgagatgcttgtgtaaagtcaaacataaatctggcctacgtgcacatcaaggcacacacagcacctttccttaaacttatttatgacacagagtcctttgctcacgtgttttcctgctgaccctctccccaccattaccctatagtcctgccacatccccctcaccgagattgtaaagatagtgatcaataaatactgaagaaactcagagaccagtgctggcgtgggtcctccatacgctgagtgctggtcctctgggcccactgttctttctctatactttgtctctgtgtcttatttcttttctcagtctctcatcctacctgacgagaaacacccacaggtgtggaggggctggcccccttcagctgtacacaagcaaacaccagattctccattctcaggttccattactctatgctgtacatttgattcttattccgccccttctgaggtatcttgtggtcttatacgctaccaggaatttgcaagtactttcccttcttgtgaagtgtttggcacacaggaaaacatgagggaatattagttactatacttgtcctttcatgaatcatttgaaatgtcacttcttcagacagcattctgggatgcctctcagttttgtcttatttataataatgcaatcattaaatataaaattgcaactcttaagtggggctaaggaagggaactatagaaggcattcaatagggaaatagaggaagcatctctcttccgggaataattgaagatcatttttcctgatcatcatcatctgctcacttaactgctgttcagaatggactgtgagttccacaaaggcagaagtctataatttatttttagccccagtgctcagaacaaaaactggaacacagcacttcaataataagactattgaacaaataaccatatttggctgacaggctacagtctttccttcttcacttaccctcaaggtgctgtgctgctgctcagtgataattaaacatagaaaagatgcagctgggcgcggtgcctcacacctgtagtcccagcactttgggaggccgaggcggtgtatcacgaggtcaggagatagagaccatcctggccaacatggtgaaaccccatctctatgaaaaatacaaaatagttggctgtggtggcacgtgcctgtagtcccagctactcaggagtctgaggcaggagaatcacttgaacctgggaggcggaggttgcagtgagctgagatcgcaccactgcactccagcctggcaacagagcaagactccgtcacaaacaaaacatagaaaagatgcaaaagagtgtatgctgtatgccaccttttgaaaaaaggacaaataaataatatatacttgtattataaaaagaaacactggacggattcacagtaaacatgtttacctgtaaaagctagaaggtcaggggaaaactaggattgagaacaggataagatattcacaaatgtgcttttttgtacagctttaagttttgaatcgcatgactatgtgacctagtcaaactatttcagagtaaaaataaacagccagtagagtctctatcgccctaggagtggaggctgatcacagggtaatctaaggatgagatcataaaataaaacaaaccctccaagcaaaaaaaaaaaaaaaaagttttagatgccagaaaacatttgaatctacagcctgccacttggcagctaagtagcttgaaagctgttggagcaacactccttaattcaaccaaatactgtctcagcatctgcgaggtgcctgatctagtgcccaatgttggaggtgaaatgatgaggaaaaaacagacctgctctcttgaagggggccagcccttccacccctgtggatatttctcatcaggtgggatgagagactgagaaaagaaagaagacacagagacaaagtatagagaaagaacagtgggcccaggggaccggcgctcagcatacagaggacccacaccagcactggtctctgagttccctcagtatttattgatcactatctctaccatctcggtgagggggatatggcaggactatagggtgatggtggggagagggtcagcaggaaaacatgtgagcaaaggactctgtgtcataaataagtttaaggaaaggtgctgtgtgtgccttgttgtgcacataggccagatttatgtttgactttacacaaacatctcagtgcagtaaagatcagtattgcccccagcatgtctcacctccggccataaggcggttttctcctatctcagtaaacaaaatttacgattgggttttacactgagacattccattcccaaggacgagcaggagacagatggcttcctcttatctcaactgcaaagaggccttcctgttttactaatcctccagggcccaaaccctttatgggtgtcgggctgggggagggtcaagtctttcccttcccaagaggccatatctcaggctgtctcagtggggagaaaccttggacaatacccaggctttctagggcagaggtccctgtggccttccgcagtgcattgtgtccctgggtactcgagactggggaatggtgatgacttttaccaagcatactgcctgcaaacacattttaacaaagcacatcctgcacagccctaaatccattaaaccttgagtcaacacagcacatgtttctgtgagcacaaggttggggctagggttacagattaacagcatctcaaggcagaagaatttcttagtacagaacaaaatggagttccttatgtctactttcttcatagacacagtaacagtctgatctctctttcttttccccacactctctgccttcaggaagtttagaatccagatggggaatgcacatggaaatctacaaaatgttaaactgcagttcccctaagtgctaggaagaagaggaacacgatcctatggaaggccagactggtgagggaaagttgctctgaattagtgatgtttgaagatcctgaaggaggaaaaatgcagaaaatggggggaaagaaaagttcaggcagaagaaagagcatgcacagaggcctgaaggtgatgaaaggatgtcagcagcatatgaggggccaaaagagggccagtgtgtcagaacagggagagcaaggtggagtatgggagagggaagaaagaaccggaacatgcagacttgatggccattttaaggatgtttgccattgtccagaccccaagcagaacagtcattgcaagtttcaaagtttaaagctagagagtttcataatcacagctctattaagcttaaaaagtatgctatatgaggaatccttggctcagtgcgtggcaacctttttgtcatcaagtcacagttttgattaagttcaggcacacctatactcttgattcctcctcttcccctcactgggactaataacattacttgtattaattgtgtttcttgctagacactgttttaaggactttacatttacttctcacaacaaacctgaggcagatattttaaagctaaagtcaagaccttggtaaattagttgctctatggcacatggcttgggcatggcagggcaggattcaaactaagcagtgtgacttcaggatacattccaaatcactatgcaggactgcctcttggcccaggagggactgaggtcatgggagcagatgaagggtgatcttcagtgaaactataaggatcttgggtttgggagcagacatgatgtgtaccaagcttaggtatgcactgagcctccttcatctgggaggtcaagctctgaaaggtacgttaagcaattgctcagggtaggcctggccaactcatccttagaccctgatagagcataagcaacctgaccttaccatggaaggatgtgcagattcacaaaggccagatgtggatagggcctggttggtggagcgcccatttctgattctttgctggagagtatctgctctgaatctatcccattataatgtgggggtaatgatggggcactaatccaggatttagggcaaagatgcacaaaattaggtgtgcaccagaaagccctcattacaaatgcagagtgccaggttccagccccagaggatctggtttaggaagtctaggggtgactcagggatttgcatctttttaaatttctgagagacttgcggcaagaagctcacagacaattacaaatactcctggagtattctgtgcttacaaatgctgtaacaggctctcctcagtacacttaggtcttggctcaaattacatccagaaaagccttcccttggagaaaaaaaataacatatttttaaaagcccccatcactacgtatgcattagtatccactactagtctttttctccttcctaacatcgtacaatctgtttctctgcctcactcaatggtaaagtttataaaggttattcctttgcctgtattgttcaccgatccatcctactgtatctaaaacagtgccttgcacagtgatgatatataaaagttacttagtggccaggcgcagtggctcatgcctgtaatcccagcatttgggaggccgaagtgggtgaatcacgaggtcaggagtttgagaccagcctggcaaacatggtgaaagtccatctctactacaaatacaaaaaattagctgggcgtggtggcaggcacctgtaatcccagctactcgggaggctaaggcaggagaatcgcttgatcccgggaggcaaagtttgcagtgagctgagttcgtgccactgcattccatcctgggcgacagagcaaggctccatctcaaaaaaaaggttacctagtaacccaggatttctgttgaattctgacctagccacaaggcaaatttccatttattttcctatgagcagcacttactgtaacttggacagtgtatccatatgggatgaaggttaaaaaaccagataaagaaggccaagagacctactcccagaaaagtgagaatgatgaagataaatcatgtctcaaaaaaaaaaaaaagaaaagaaaaatcacatctcagttcagcaggtcacagagaagctgggatctctgaaatggtaaccctagcgggtgataggtcttatggacaaataaaagcgtcatctctaagacgtcccaaaagaaacccacctcctcccatctgttacagtctcatccattctcagagactaagattttcctcctcctttgtgttctacttattctaagagtccttttccttttctgctctgccccttttatatttggctaagtctttctaatcacacaaaagttgtgagtgacaattctattctttacaactgtcattcccttcaatgacaaaatacgcttctctttccaaatcattctctctccaaatcaatacataattagtttttgtttttctatgtgttgggaaatattagatcatgcaaagcagcctctccagcataactttctgggatgttggaaataatgacaaagagtcctcattgtctgaaagttctgttcactctgctgtccagtttagtagcctctactcacatatacagctcttgagcagtgagggaactgaatttttaaattttgtgttcagtttctttaattctaaaatttaagtagctacaaaacttagcagggaatttgtaatctcttggagagataagacacgggcaaaaacaaacaaacaaaaagccctcctttttgtactaaggtgcttaagtaccattaacagcagtccttctgctactccttgaacaataaattatcgcgtcccctggacacagttactccatgtccatttcacctaatgtagatatttgcaccgcctgactagattgcctgagtgtaatgataccacttaaaattaaccccacaaactctccaggagaccacaaactttttcttctttgacctcagctcctggaacaggacaaggtacaaaggaaataattttaaaatatttgtttaatgaaacaaattgactagtttcacagatccctctgcataatacaaagttctgaaagtttatggtcctggttttcaattaatcctccacactggcactggtctaaggaaactgaattgacacatatgtgtcccacattccaccattacagtattagccctttcccaccaactgccccttatgaagcttttcagtcactgcaacactcccgacaccaattatctcatctgttttaaaaattcacagtacttcatttcctccacttaaaagtacttgggcttcctttactcatttaattgacacagtcgagcaattgctgtgtatgtgcttaggttaacatcaaatttgcctgtgtatcacagcatacattttaataggatgagtttatcaggctatctcagccttatacatgttctctcagtgtatgcttttcggccacataatgaactacaaatttttgctcaacccttttccacatagatctgagttttcttcctatgggttttctgtaacataaaataagacataattgatcacggaaggcacaaccacattcactgcattcacaaggtttctgtcctgtgcaaatcctctgttatctcctgaggctgcacatctgaccactggctgtcccacaaggactacgttcctgtttgcgaggaggccgctgatgtttaatgatgtctgaggggccacagaaggcacttgtgtagtcgccccgttagcagagtttttctcctgcatgacatcactggtgtgtaatgagctgtgcctctctgcaggaggattttccaccttggctgcctcttgtttctcccttgtgtgtattctcttatgcttaaccagacacgacatatacgcaaacgctttcccacactcgttacagccatagggtctctctcctgtatgagtcctttgatggacaatgagcttttgctttgtgctaaaggctttcccacattcactacattcaaagggtttctctcctgtgtgaattctttgatgtttaatgagacctgatttctgagaacaggattttccacattcactgcacacaaagggcgtctttcctgtgtgaaatctctgatgtgctatgagacacgtcttctgaatgaagccttttccacattcattgcatatataaggtttctcacctgtatgaattcgctggtgtacaatgagatttcctttctggatgaagccttttccacattcactgcatatatagggtttctctccggtatgtgttttctgatgtatgttgagccgtgatttcttgagaaaggctttgccacattcagggcattcataaggtttttctcctgtatgagttcgctgatgttcagtaagcatgaactttctggagaaggctttctcacatagactacatctgtggggtttctctcctgtatgcattacctggtgatcagttagccaagacttcttgatgaaggctttcccacattcactgcacacatgatgcttctctaattttcgtgttttctgatgcttgggactgatgaattgggacttagtgctgatgagtttttgacttgcagggaatttaattgcagtatgaagtcgttcatggttagcatgaagaaaggagtccccatttccagtaaactcaacagagttctttatttcatagcctttgctctggttaactaaagttaaattggatttcaaactttttccacgtaagtcaaatatatcatgattttgccctaacagaaactgacttttgctgcaatgaacaatattttcaaatgcatcatgttcatgacatggtttccttctgttcaccaggctttcactctgcaagcgctccagcacatgatcaactttccatatgtctagaaagaaaagaacaaagatttctatcatttagatttggggtaaaagtttgttgtggtttttttgttttttttgtttttttttttaagatggagttttactccgttgtccaggctggagtgcaatgctgcgatctcagctcactgcaacctctgcttcccgggttcaagggattctcctgcctcagcctcccaagttgctgggattacaggtgcctgctaccatgcccggctaatttttgtagttttactacagacggggtctcaccatgttggccaggctggtctcgaactcctgacctcaggtgagccattgtgctcagccaaagtattttttgttttgttttgtttttgggagacggagtctcactctgtcgcccaggctggagtgcagtggtacaatcccggctcacagccaaagtattttttgttgttttttttttgttttttggggacggagtctcactctgtagcccaggctggagtgcagtgacatgatcccggctcactgcaacctccacctcctgagttcaagcgattctcctgcctcagcctcccgagtagctgggattacaggcatgcaccaccgcacccagctaattctgtatatttagtagagacggcgtttcaccatgttagccaggctgatctcgaactcccgacctcaggtgatctgcccgcttcagtctcccaaagttctgggattacaggtgtgagccgctgcacccggccccaaagtattcttttttttaatgccttgatgtgaggtgtctcttagtaataaccctatgacctgagtgtaaataaaactccatgtttaatgttccttgcacattggcaaaaagtaatagtataaacaaactaaaaggtgaaagcagttagcataaaacaaggttagatcactaataataaagacagatttggctgctttctaaatgtgccttgcaaaacagaccttaaaatacaagcaattcactgtgaccagcagaccagaggctggaggcccatttcgtccaaagaacagattcattcattccacatactcttactgaatgatcaccgtgtgccaggtatggtgctggtgttggggataggcacaagaatcgcttgaatccaggaggtggaggttgcggtgagccaagttcacaccattgcgctccagcctgggcacagagcaagactctgtcttaaaaaaaaaataaattaataaaaataaataataataatgaataatttttaagggaatgagtcagggaagtaatcatatgtgtggaacacaccaggcagggtttaggaaagaggatggaaatctctttgtgagcaagatggtattatatcacagagatcactgaaatgagaaatttgacaggtaacatggtttactgggacttggtgtcatcagaatacgatggggaaaaaaacgaaagcaaattattaaatacagaaaggaaccaaatggaagtaggcgggagttgagaatgtaggatgttaaaaaaatgacttttttacttagagatgcatcatgactagcagagacctttaaagaagagagctcttcaggcaggtaatacccagatggccaagattcaggatgtacaggaacaaacgaaaatccaaacttaatggttttcttggaggaaagatgattctagttccttgcagttactaggaactcaggggagagttgccatgaagtaaattacacagaactaaaatctgtgttagataacaacagggagatgtcagtttgggactctcctccagggagcggaaggagtttaaacttactagaatgaaggcaattttgaagagtgaagggcacagatgagaaaatggagaacgggacctttggagaacctaagaataaggaaaaagagaagcgaaggaagccaaggcacagcgaaagtccagtttaccctgaggaagccacatccatcacaggggaggtgttaggaggggaggtcagcattagccaaggggcacaaaggggtgggagtccgaaaacagtgaggacttcaaagtttcctctttggaaagaggcctggaaggtggaatttcgtaacaagagaggtggaacaacatgaagaagggaaatacttgaaacccgaggaagaagaaaattatgcaggcaaacaaacaatatgtagataaaataatcagatctctgaggagataaagagtttttgttttgttttgtttttttttaactctaaattcctacaaagaaaaactggtctcacactgggagacagatgagtagaggaactgtttacatatcctcaaacccccttcacagctgtgctgccttctctgactgtctagaatgtgacttccatagccttctgtcttgtgggttctctcacctgaacaggctccactgtggattccatcttcaattgtccacagttgttctccttgttccaacttgaagagtgcatccggtttgctggcttgataccctgttcatggaaaatgatagaggacttagacatatcaaattgggctggcaatgtcaagaaggaagaatgttacatttcaagaaacttgagtttcttaaaatacccaaaatttagtttcttatctgaaactatgaaagtttcgtttcatatctgtaacatcaaggtttttctcttacaagagggtagattacaccgtcttgtgtgggagcaagagaaggatctgagaatctaccacttcagagtactgcaggcattccaaagaggtaggcatctgagaaaggaaggccactgactaggcaccctctgagtgacacagggcagctgtcctcacccactgccaccaggttgctgtagttctccaacatcacatcccggtacaggtccttctgagcagcgcccaggagttgccactcctcccaagtgaagtccacagccacatcctccagtgttatggattcctgtaataacagtcctgtttaataaagtgatgtctttttgatgatgtggaagaaatgctaaagtttttctgctcatttccactctacaggctgtgtgcatataccaaatagttttttttttaatacaatgtggaagaagtaaagtcctaatataatattctgtaactgtatattcagtcatcctccattcacccaattggaagtttctataaagtgtagaagttaaatcttgctaacctaaaaacaatatatttatacattttatatatgtaaatatatatgaatatatgtacatatatttattttagatacatgcaaatgaaagacatatatacagccatcctttagtatctgtagggtattggttccaggacctcctgaggatactgaggtgtctgatataaaatggcacagtattggtcaggcacagtagatcacacctgtaatcccagcactttcggaggccaaggcaggagggtcactcgagcccaggagttcaagaccagcctgggcaacatgagaccccatctgtacaaaaaattaaaaaattagctaggcacagtggtgagtgcctgtggtcccagctacttgggaggctgaggcaggaggctcatttgagcctaggagttagagactacactgagttatgaccatgctactgcactgcagcctaagcaacagagcaagactgtctctaataaaataaaataaaatggaatagtacttgcagatttgcatgtaacccatgcacatcctcccatatacatttctgtttttttgaaatggagactcactctctttcccaggctggggtgcagtggcataatctcagctcactgcaacctccgcctcccaggagcaggcaattcttctgccccagcctcccaagtagctaggactacaggcatgtgacactacgcctggctaatttttttttttttttttttgagacggagttttgctcctctttcccaggctggagtgcaatggtacaatcttggctcactgcaacctccgcctcccaggttcaagcgattctcctgcctcagcctcccgagtagctaggattacaggtgcccgccaccacaaccagctaattttttgtatttttagtagagatggggtttcactatgttggccaggctgttctcaaactcctgaccttagacgatccacccacctcagcctcccaaagtgctggagttacaggagtgagccaccgtgcccagccccatatactttaaattatctttagattacttataatatctaatacaatgtaaatggtatgttaacagttgttatactatattgtttagggaatcatgacaataaaaaagtctgtatgtgctcagttcagatgcttaaaaaatatatattttcaatcctcagttggttgaatccatggatgtggaagccatggatatggagggccaaccatatatcacaaatccaggcctcctatttttctgatggactaattataaactgagggttcctatgacctccttgagtttgataatttctcaagaagaaggagaaaatcaagtaatggagaaacaatatccaaagatctaacactgaaaatttttcagaactgattaaacactccaaaattcaaactcaagaaatccaacaacttttcaagcaagaagtctacacgtaggcacaacagattgaaactaaattacaccagatacaaagggagactataaaaaaatccaaagaccaatgacaggttacctacaaaggagacaaaattttctgacagctgactgctccacagaaatcattatagccaataaatattggaacaataaatgtaaggtcctcagctcttggacaacacagcccaaccttgaagaccatttaggactgaaaggcatggctggcaaaggacctacagccctgtaatagtgacaattaagactacttatcaatgaattgtcaatctcttgtctcaggatgcaggatggctttaaaggatactgctggtgggaaattgagtcattgaagacccagggaacagcagaaggtacactctatactcattttattacagaggccagtgaacacacttggtagatgatacaagtacttaatcctggttggtttacccattctaaattatttatgtgagatagctatctatttggaaaaaagtaaagtgaaagtcttacctcaatccacactcaaaaatagtttactatatgacagatctatggcaggcagatttgatggctcaatgaactccaccctcccagtgttcacacctttatgtagttcccacttacagggagccaaaggtccgtgggacgtgaccaactcagcattccactggaggctatatgatcaaacagcaaactgtttatcatgaatgcaggatgtgagcaaactcaccattgctcctgccgacagaaggttttctggaggcaatcactccctggtgctgaggttatctactgcaacatttagagaatgtagtcttgcaagcctcctctggactgagcagctgacccctacttccactgcacccccccaactatctcttttgcctaataaatgcagagggctgtgtaaagctcagggcccttgtccactagaggcaaggtaccccctgaccccttcctccgaatatacttttgtctcttgtcttttattcctgtgttcaccccactgtgttcagtccccctaggtctgtgcgggttacaagtggcgcccaaacagggacagaattgggtgctctacaccctctccttgagcagggactggcctagtgacttacctctattcagaatatggcaaaggcgttggaatctcacctccttaattaagctatacatgtttaaaaaaattattcaatgagaattgttaaagcacagtaaggaagactttattcagggccattatgacaggtatatagacaaatgtaatgggattttgcagtggtagagggtgaatggacttaactccaaatatcagcataagcaagtgggaatttatagccaaggagcagagtatgggtcagtaatacaaaattaccaagagggccaggcacaatggcttatgcctgtaatcccagcactttgggaggcaggaggattgcttgagcccaggagttcaagagcagcctgggcaacatgacaagaccccatctcaattaaaaaaaaaaaaaaaaggaaaaaagaaaaaaagcagaaaagtaaaagtaaaaaataaactcatagtcaacccacccccgccacacacacacacacaaaacctttatgatcttttatcatttttcagattaaatacttgattctctcctaacccccaatggtgacaaatgcatttttttcaagtatagctataaactgatggaattttatataattaatgttcttcaatcatttgcaatcattggtctttggatgttcaaagtgtagcatcttcggccaatgaagagtcccttcaagttggctgctatgttctttgaaatatgattctatcatgtaaaatatatatatgtgtatatcataatgaatatatatatctacagatagattcatatatactcacacttttattaatacatatatagacatagatccacaaacagatacagtgacaggaagtaaatattaccaaccatttacagaagtggattaggaagaaaatatgtgaaaagaaaactttttctcttttcttcaattttactaaatatagacaaggtctcactagattgcccaggctagtctcaaactcctgggctcaaggaatcctcctgcctaagcctcccaaagtaggcataagccactgcactcagccagaaactttttttttttttttttttgagatggagtctctctgtcacccaggctggagtgcagtggcaccatttcggctcactgcaatttccgtctcctgggttcacgccattctcctgcctcagcctcccgagtagctgggactacaggcacctgccaccacacccgaccaattttttgtatttttagtagagacagggtttcacggtgtgagccaggatggtctcgatctccagacctcgtgatccacccacctcggtctcccaaagtgctggattacagccatgagccaccgcgcccagccgaaatttattttttgatatgtgtactttcttactttactgggacacaatcacagatgacctatgtggctgatcttaggtccacaccctcccagaagtcaggttttaactttagcctctagttctggaagtttctggcctatcatagatcacagatctatcatagttcgtatttttaggctgtccagtggccaaaggacccaagcaaacaaagacactaccattagcaagatattccagaagcccagagctcaccctccattagcttgaacacaaaggccaaaactccctttgttcaattatttactatacaataaggacttggcattttctacaaggtgaaagtctaaaggaaatctgtaaactccaatccaagtcctgttcagacaatatcactttcaactccctgtctccaaatctatattcaaacaccagttcagctatctgttcattgagaaccatttgaaagtcctggaatcctgccatattcccaggatgtctaggttttattccaagttaaatccagactgccacaaggctgaaattaacttgtgttggtccctgtgtttactgtttgcttagtctattccgtaacagtatataaggagtccttcaagaaacagccacaggaaacctgcatctgaatttatgagaaggctgctattctggacaccatccaccacatcaactctaggaagaaccactgaagaaatttcctgagaccaaagtgccatgaaataatggcaacccccaggaagtaatctgttttatcttcaaaaacaggacataccatgtaaattatgattttcttgtgacattggctgtcagagatattagatgcaagctgacagctaatataatccacaggatcctccagccatgcatggtgtcacaaaattcataatttagtgttaatgctatgaacattatattccttatcctactattttgcatgatattgagtttaaaaactaagcttacttctctccagatcctgctttttgaaatttatactttttatattagtgaaattgatgtttataggcttctacaaatctattatggaacaaaggaaagaataaaacaaaccaaaagtcagttacctgggcctggatcattttcttctgttcttggaagacagcattcaactgggatggtctgtctttgtatcttctggccttctcttcagaagtctcagttttcaatcaagtgtgccccaagaaatggtgaaccccaaatccacttcctccctcttcaggttatgttttttgctcctgaggagtcagaacctgtgggttgaagagcaaattcaatgtaagtggtacattttttccaggcccagatactgtcactgctgctaggcactcatcttaaagcaatgcccccaatatagttaactatatacctttgtttggagccccagcggattttatacctgtggccaataatgtctaggattcttaatgtggtggaggtatgcctttcctctgtgacgtttccgtggaaggactgtgaaggcaggtaggaaatgagacccaccatagcaccagcctcaggagatggtgaactcttaggcagattagttttagaaaagagacaatcagcaaggagaggacctggtctttgttttcctttaaatcatgtgtgctcccacacctcttcaaaagtctttgtacatacaccctgtgaagacatgtacttcagtttgaaagccaatgtactgggcaaatcataagcattgtcataaaaacagtactgacaatattttaggaggttttaaatacataaaaagctaaaatacacaataatttactggataattaggtggtgaataaagttgacgtgctctaaggtttctgtagaatggaaaagtgccaattagcagaagaatatgacaaaggttgcacactacatgtaatctctagttacaattaacactagtaagtccaggcacagtggctcacgcctgtaatcccagcactttgggatgccgaggcgggtggatcacctgacatcaggagtccgagaccggcctagccaacatggtgaaaccccatctctataaaaatacagttattccagaagctgaggcagaagaattgcttgaatccgggagatggaggttgcagtgagacaagcctgtgccattgtactccagtctggtcaaaaagagcgaaacctcgtcttaaaaaaaaaaaaaaaaaaaaaaactagtaattgttttaaagtacgtaagttccatgccaacaaaagggggaaatgtaataacaagaaattcatccaaaagaagagaatcaaaaacagagcaaaaagagcaaatacaatgcatttagatagctgttttaaaataaaatgtactaagaaaattacattacattaagtattttatgctaagtaaaaacagagcatggatcccagttaattacattaaatataaatgcctcaaaactgtcagaatggattaaaaattaaaatccaataacatctggggtttattttattttattttaatttttgagatggagtctcactctgtcgcccaggctggagtgcaatggtgtgatctcggcctcccgggttcaagcaattctctgccttagcctcccgagtagctgagtttacaggcacctgctgcagggagccgaaggctcgtggcccgtgggacgtgaccaactcagcattccactggaggctacagatcaaacagcaaactgtttatcatgaatgcaggatgtcagcaaactcatgactgctccggctgatgaaggtttgctggaggcaatcactccctggcgccgttatctactgcgacatctagagaatgcagtcttgcaagactactctggacccctggcgccgttatctactgcgacatctagagaatgcagtcttgcaagactactctggacccctggcgccgttatctactgcgacatctagagaatgcagtcttgcaagactactctggaccgagcagctgaccccttcttccacctccccttctcactgtctcttttgcctaataaatatgaagggctgtgtaaagctcagggcccttgtcccctagaggcaaagcgcccccgatcccttcttccaaatacactcttttgtctcatctttattcccgtgttcaccccactttgtttagtccacctaggtccgtgcaggttacaaatggcaaccagaacagggactccaagcacgcccaactagcagcatccaaacatgggacttcaaggacgtgaatgaagaaggtctgctggagcagaggaactgaaattgacaaggcgaaaggggaccctgggaagagtctgccggcagcagatataaggtcagtgccctaaagaggtactgggagcagtgctttaaagaagtactgggaagttttctgactcagggtaacaagggaaagaatttgtctattgaagaaaaacattatgtgcagttgcttaaagttctgttgagacagtctgcagctcaggttaattcgcagacactaacctcctgcagaagccacaaaaggttattacacataacccatcgtttccacaggcaggcactcttgatgtggaaaattgggatacagcaggagaaggattaaaacaggctcatcaaaaaggtcttaaagtcgattcttctgttttctccacttggagtttagttcgtactgtacttctgccattatctcattattattctgcaggacagcaagctgaatctaaaaatctgaaagaatttgttgacccacccacagctccaattaaaaataaaaaacaggagagggaggataaaaattggcctatactgcctccttcagttgcagaaacatctgtactgcctccttcggtggcagaaatagaaaccctaatacaaagaatttaatgctctgctgccatagctggagagcccttaggacattgtgcttttcctatttccatcaggcctgatccaaaaaatccacagcaggttattcatgaacacaccccactagagtttaagttgttgaaggaattaaaagcaagagtggtaaatgatggcatacagagcccattcaccttaggattgctagaatctgtgtttggtgctatgcgttttttaccctttgatgtgagacacttggcgcgaacttgcttgtctgctagtgcatatctgacatggaatttaaattggcaagaaatgtgtgcagaccaggctaaacagaaccatgctgctggacacggagacattacagaggatatgctgttaggtcatggcccttattcagatgtagaacgtcaaatggcactcccagatgctgcttatcagcagtgtacacaggccgctaaatgcgcctgggccacaatcctgaagagggagtccctgtacaatcctttttacatatcatgcaagggttgcaggaaccctatgcacaatttcttgcaagattacatgaggcactgaagcgtcagattcctcatactgtggctgcagaaatgctaaccttaactttagcttttgagaatgcaaacgtgtactgtaaacgtgcactggcaccagtgaggtgtacaaaaaacttgggaaattttctcagagcttgtcaggatgtaggaactgagattcatcgatctgcaaagttagcataagcaatggctaatttagcagttgacaaatctaaaaggagccaagggtcaaaccctaaagtgggaaaatgttgtaattgtggaaaaactggacatctaaaaaaggaatgccgccagatctcaggacagaaaggatattacaatgcagttcactccctagcagaaaaaacagcaggactctgtactcgccataacaaaggaaatcactgggctacccagtgctgctcaaaatttcatcagaatggcaccccattggtaaatgagatgggggcctgcacccgggcccctcaaacaatgagggcattcccaatgcagaccacaaccccacttcagggatgggttcctggaggcacattgattccctcaacccaggaacaccaggaagtgcaggattagatctacccaccagagaaagaatcacattagttaggggagacaaacctatttgggtatttggggacctttaccgacaggatacacaggactaattttaggtaaaagctgccttaacttgcaaggcatcactgtagtcctaggaatgactgactccgattatgaaggagaaattcaagtagttttaatgtcacaaaatctttgggtttttgaactgggagaatatattgctcaattattgcttattccctgtgaattacacccttccccatgaaaagagaaatgaggaaataaagggtttgggagcacaactacatgggaaatctatctttcccaacccatagcctctaatagacctacctgtgtagtacacattaaaggaaagaaattttatgggcttatggacatgggagctgatgtgtcagtcatatctataggatgggcacatcaaacattacaacgcatgttgaaaaaacaaaaagggggtataggaggccaactaccacctcaatcaaaactacatttagccttatttactttaaattttctgactcccggtatggatggtaagactccagcagaaagacattggcaagtgttagaggaaaaaagcaaagtttatctgaaagtgttatggaaatccccagaaggacaacaatggaaaggcccggtagatttactgacctggggaagagggtatgcttgtgtgtttacaggagatgggacaagccatgtgggtgccctcaaggtgcatgcgaccatggaatgggagactggaggaacccagggtggccaaccatgggcccagtccctcctgtacgagctatgagtcagctgagcctgagtgcaaagatggagagaaggccaaccagagtcatgatgacatcaacccccataacctggggacaactcaagaaaaccacacaggaagctgagaaactactggagtgtcagggacaggcaaaacccctgattccatgctcttggccatgttagccataatgtcctgtgcactacgttttccctgtgcacaggcaaaaacatattgggcatatgttcccaatcccccagcagtatggcctatactttggagctcactcctcctgagatttatcacgatcagggagagtgggctccaggacccctaactccccgtgacatagaaaagttagactctcagaacaatgtcattaattataccactccactggaaggactccctttgtttatcaccacaaagacgtcgctcagccatagctgtcttgcaattcaagctcaaacatggttgagtcactatggaaaaattatgtacttattaggtcttggttctattaatgtaactggtgtgctaaccaatcattcccagtccagtcaccctaattgtgctgattatacagaatggattccattcaatagttcctaccccactctgtggacccagtgtcttgatccactggctagtaaacaatatatgtcaactgaagacactgtggattgggaacctaaaggtcaattagatggaaaaggtgaaagtcagaaatcatggcacaaacttcactggcattggcggcaagcttttaatgcttcttctttatacaacagcagaatccaatcccagtctgctgctcagattgcttggcatggagcaggctttagcccacctcttcctcagttgcattatctggggaggaaaggaccaattcaagaaactatatggaaggcagcactcccatttatgaatggcaacatctggattggaacactgtctaataatagcaatagtaagcaacacagtcttaatgttgcatttgtaaagaatatcaccactcagtttacagtttgtgtttttaatccttatgcctttttggcagctaagaagaaccagcttcaggtaaacaatacccaattgacctgtaaatcttgccagttatatcacactgcattaatcatagcacattacgaacacataatatctctactttgataatgttgggttgcatccctgggctatggattcttgttaatctgtctgagccttgggctgccacacctgctttgcatttttgtaacacttcttctaactcagcttactcactgtgtccatagagccttaggcataatttttgctattgtttccttggtcaaactaataacttctgttgtgatatcttctgtaactctgcataattctattcaaacatctcagtaggtggagaactggacacgcacagctgaccaagcgaggctacttcagaataaaattaacactgagttacaaactgaagtggcaatgttgaaatccatggttctgtggttaggagaacaggtacaaagcttgcagttgcagcagcaattgcgtcatcattttaatcacattcatatttgcgtaactaactcagaatataaccaaagtgagtatccgtgggaccttgtgaaagcccatttgcaaggagctttcacatccaacatcacctttgatattggtgaattacaaaacaaaattattgatttaaataggcaaactcaagaatttcagccttctttagaagactggaccgaattccaggaaggcctggagagcctcaacccttggacctatctaaggcaccacattaacatcttatatgtagttcttggaataatgttgttttgtctctgtcttcggtttatagtctgtaaaatcggatggaccaccaattggagaatgagagcctcccagcccagccttacattctttcaattaatacataaacagaaagggggatatgcagggagccaaaggcctgtgggacgtgaccaactcagcattctgctggaggctatatgatcaaacagcaaactgtttatcatgaatacaggatgtgagcaaactcaggactgctcctgccaacataaggtttgctggaggcaatcactccctggcaccgaggttatctactgcgacatctagagaatgcagtcttgcaagcctactctgaactgagcagccgaccccttcttccacccccccaccctcctatctcttttgcctaataaatacggagggctgtgtaaagctcagggcccttgtccactagaggtaaggtgctccctgaccccttctcccaaatatactcttttgtctcctgtctttattcccacgttcacccccatttgtgcagtcccatgggtccatgtgggttacggcccgccaccgcgcctggctgatttttgtatttttagtagagatcggatttcagcatcttggtcaggctggccttcaactccggatctcatcacacacccgcctcagcctccccacatgcggttattatagttgatatgtctgaaccaaaatgatatgggaagcttgagaataaaaggttggagacaatatgccacagagagagtaaccaaagataatctgttataactatatctcagacaaaactgaccagaaatcctaaagaattaacagagagaaagagaaacaatgctcactgaaaagaggtgaaatttggctcttcattcatagaaatacaccatatgtatacccctaacaacagtcttgaaatgtatacagcaaaaaatagaaccaaaaacaagaaatagaaaattcagactaaagactttaacagacctttcctagtaactgacagaacagaccatcaacaaacaaaataaaatttataaatgagaaagaaatgaatcttttatctgaggaatgtgactccctttaaattatcaggtctagagaggcattaaaatgtgacagcagtctttctgataggggttcccctgaaaaaaagaaaaaagaaaaaattaaaaactaaaaaaaaaatttaatgtgacaatagtcacatctcatttccccctcaagctaaataattatctcttaaagccacttgctatgtaggctctagactaactcacactgagtagccataaaatgccattcactggacatcctaactcataaaaccccatagttaacaatgtacagccaattgttaattgatattatttctgtaaaccaatgagaattcttgccaaacaactttatgtcagctcacggtttgttcccttttgactttaaaacctgtttctaacaaaatcctaacagagcacttaaccaaggcaacctgaaagtattttcccaggcagctgtcctcattttggctcaagtaaactctttaaaattgtattttgtgcagtttcctcttttaggctgacataaacgatatcatttagaagaactcgaatatatttttaaaattagatttactgagataaattttaacagttttaaataaatgcaaagatgtactataaagatgggctggaaaacaaagcattttaaaaatgtcaagtctcccaaatctacagattcaatgaaatcacagtcacaatcccaaactgatactgaaaagtttaaatagctataaacttttttttaaagtttgaaaaaaaagttagaagacttgccatatcagttatgaggacttataaagctactttaattaggacagcacaatattagtacaataacaggcaaataggacaaaggaacagaataaaatccttataagcagaattaagcacatatagagactcaatggcaatgatagcactacagggaagtagataaaagctgtcttttcaataaatggaactaagggcgccgtggctcacgcctgtaatcctagcactttgggaagctgaggaaggtgtgggggaaagagagatcagactgttactgtgtctatatagaaagaggaagacataagaaactccattttaatctgtacaaagaaaagttcctctgtcttgagatactgttaatctgtaaccctagccccaaccctgtgctcagaaacgtgtgctgtgttggctcaaggtttaatggatttagggctgtgcaggacgtgctttgttaaaatgtgtttgcaggcagtatgcttggtaaaagtcatcaccattctccagtctcaagtacccagggacacaatgcactgcggaaggccgcagggacctctgcccaagaaagcctgggtattgtccaaggtttcctcccactgatacagcctgagatatggtctcgtgggaagggaaaaacctgaccatctcccagcccaacactcgtaaagggtctgtgctgaggaggattagtgaaagaggaagacctctttacagttaaaataagagaaagccatctgtctcctgctcctccctgggaatggaatgtcccggtataaaacccaatcatacattctatttactaagataggagaaaaccaccttataactaaaggtgagacatactggcggcaatactactctttactacactaagatgtctgtgtaaagtcaaacataaatctggcctacgtacacatcaaggcacaggacctttccttaaacttatttataacacagagtcctttactcacatgttttcctactgaccctctccccaccattaccctatagtcctgccacacccccctcaccaagatggtaaaaatagtaatcaataaatactaacaaaactcagagaccagtgccggtgtgggtcccccatatgctgaacaccagtcccctgggcccacttttcttcctctgtactttctctctgtgtctgatttcttttctcagtctctcatttccaccttgcaaaaaatacccacaggtgtggaggggcaggcccccttcaggcaggtggaccacttgagccagagttggagaccagcctggccatcatggtgaaaccccatctctactaaaaatacaaaaattagccaggcaaggtggcacctgctggtaattccagctactcgggaggccgtggcacaagaatcacttgagcccagaaggcagaggttgcagttgagccaagcacgccactacactccagcctgggcgacgagagcaagactctatctaaaaaaattaaaaaaaaaaaaaaaaatcaataaatggtactggggatggggacagaaagttaaaacccccctcacaacatacacaaaaaccattttagaatcaactgtcaatttcaatggtagaaacatatcaataaagctttaaagaacattaatataggagaatctctcaatgttattagggtatggccagatattttaaagaggccacataaagcaccctataaagcaaactatatcctgctaggggaactgtaagtggtacaaccactttagaaaacagtttgacatctatttagacggagtttatacacactctatgaagcagcaattttcctccgaggtgcacatctagatatacatctctgcctcccccatatgagagcacatatgaaccaaaagacatttacacaaattttcacacatgcattattcttaataatacaagctttaggtaatacaaatgtaattaataatagaaaaaactgctatattttacataatggaatgtgatagaaaacctattatacctttggtccagcctgcaagaatgctttttacatttttgaaagactgtaaaacaaaaagcaaattagcatatgcaagagaccatatgtagcctgcaagccctaaaatatttactgtaaattcgcctgatccttgtcattgagcaaagaaaatatactcagatgcaacaggaaagaccctcaccaataatgagcaaaagaaggctgacacaaaaaaagagtgatgtacaattccactgatatacagagtttaaaataggcaaaactgtattaactacaatgataaataatgattaattatataaagaaaagcctaaaatacttttcggtgtgagaatggaaaaagactcacagaacaccactggtgtgctgaccatattctatttcttgacctgggcaatgactgcttatacatatattgcctccatgataattaaattgtacatttaaaatatataaatgtagaaaaattaacaaagtaaaggaagagatcaaccataccaaacagtttacctccaggaaaggtgttaactccagacaacacaacgggtgaattttacaggtgggtaataaaacaagaacgtccactaacaccctattttcctactttatactggaaagttgagccaatgcattaagataagaatgaattataagcattacaaagtaagacagaaaattaatgttattttcaggcgatatcatcacgaacatggaaaaagagattcaagaaattacatatttaaaaaagaaaatgctccctcagaaactcccaggcagattttcacatacatagttggctagaattgcaccatacgcctaagctcatttccatgtcaaacctatcactagcaatggcaattggaaccagcaagattggctaagaccaacaaggccttactaagaaactgggatttgggtcgccttgccacagggatgaatacttcacgaaatggagattctgttaagaaagtgtgaatataaggcgggcaagcaacactcactatatattaagaagtgaaggccgggcgcggtggctcacgcctgtaatcccagcactttggaaagccaaggtgggcggatcacctgaggtcaggagttcgagaccaacctgcccaacgtggtaaaaccctgtctctactaaaaatacaaaaactagccgggcgtggtggcgtgggcctgtagtcccagctactcaggaggctgaggcaggagaatcgcttgaacccgggaggcggagattgcagtgagccgagatcgcgccattgcactccagtctgggagacaaaagtgaaactccgtctcaaaaaataaaaaaaataaataaaaaataaaagaagtgaatgcagaggttggcaacattttcgattttgccggccacgaggtctctgtcacaacaactcaaccgctgcctttgcagccatagacaatatataatcggagggtatgactgaacttgaccccccgatctgtaaatagccaccccaaggatcagaagagtagatatatggtttcgaactaatgctgggggctgtgtcgccttttgccccagtaaccgaggttcgaacctcaacccaggacccagggctccaaagtctcgaaagcttcagccctcacaagcctttgtaccacagacactggccccatgcctcttactcatccgaaccacggaccagacactctacagcgatggacatcctcccagactccaacatcactgagttccaaattaaatcctgaacccgaagcagacgccgcatcgatcctaatcgccacctccatcctttacaagcagagtgatccataccttgacagttaggacacggccgttgatcactacagacccttagtcactgtactcacaccaaaggcacgcggaccacagacagggggatcacagactcccaccaggtacctcccaaatgcctataccccggcgctccccagtcttcctgccaaaaactatgtggtccagggtacaccacgtcctcagatctcccaaaccttccactgagacaaaacctgaactaggacaaaaaactttcagggacaaaaccacacactgacctctattttctccagatacacaagaagggcctcaacgttacacttccgtaaactgctcctacttctggagtcctcgcacgggtttatggtccacctacggcggccgaggagaacctaaaatgtttaaaagagcaaggacaagcgcatttacggcatttcctactctgtaaaatggccgcgcccatagccgtggctcctgacggcagccatgtttgaaaattggacgcacagaaggcagtggcaggtttttgagccaggagccagggaagaagagaagtcactgaaatcgcctcgtttcctggcacttaaagtcttgcgaaagggggcagattttcagagactcaggctttatcaggcaaatatggggcaagctaaattgcctttagcgcttttccatccactttgttaaatttaaaaaaaaaggttttgaaaaagacaagtaacagtgcagccaggtgtaggtatcccagagaatgaattggaaatggaaaaggtaacagatcaggtagaaagggaaaaggcaacacatcaggtaggcagacacccacgggaaagcgtctggcgaaaattagcttgcaggaagcggtttttaagaacagaaaaatagcaggtattcgggggggcgggtggtgaagaaagaaaaaaattataattttttttgagacggagtcttgctctgtcgccaggctggagtgcagtggcgagatctgggctcactgcaacctctgcctccctggttcaagcgattctcctgccttagcctcccaagtagctgggactacaggcacgcgccaccacgcccagctaatttttgtatttttagtagagactggctttcaccatgttggccaagatgatctcgacctcctgacctcgtgatctgcctgtctcggcctcccaaagtgctgggattacaggtgtgagccaccgcgcctggcctcgaaaaaatgattattatttacaaaaaagaagaagaagaaggaggaagaggaggaggagaaggaagagaaaagaggagaaaagaagagaaaagaggagaggagaggagagaaaagagattttgagaatgaattacgatgtgagcctggccacgacagactaaaggaattgggcctcctagaaaggccacttttagtaaaggtgccaatgggaagagcagagccagaattgagagtataaaaatattgttaagagtttttgacaaaagtgccaagacaattcaataagaatagtcttttcaacaagcggcactgggataattggatatccacatccagaaaaatgagttaggaccctcaaaccatacacaaaagttaactcaaaatagatcatagatctaagtttaagagaaagtataaaacttagagaaggaaaagggagataatcctcatggacgtgagttaattctgagaggagagtaaaggatgacccacaaaacaaaataaaattaataaagtggacttgatttttttttaagtttgtgcttctaaacacaacatttaagaaagtgaagtggggcacggtggctcacacctgtaatcccagcactttgggaggccgaggcaggcggatcatctgaggtcaggagttccagaccagcctggccaacaaagcgaaaccagtctctactaaaaatacaaaaattacccggacgcggtggcgcgcgcctgtaatcccagctactcgggagcctgaggcaggagaatcgcttgaatccgggaggcggaggttgcagtaagccgagatcgcgccactgcaccccagcctgggcgacagagcaagactcctcggtaaagacaccacttcgtcaccctgaattactctgatttttatgggtacaatgagaatagtggacctaggaagaaaaagtttttaaatagaaaccttcaggacagatttggacttgaaagactgacaggaagtgtttccagcatccagttagtctcaaagcaaccactaaccttcaactgcacacctgaaagcctccagcctcattacattctcaaacacagacaagccccgtcttcctctaaataaaattgccttcaaattcaatttaaaacttaccacagaggcactcctttgacactcctccccctagacctttcattcacgccactcctcttcctagctcgggcttctctgtatctgagccccatattaaattgcaaatctgagcaaaaaacagcattcactgagacacactttccccagttttctattactgagactcatgaaaagtgaacatatagacctcaagctctgtccgtgggaccctcagtcattaaactcttaaaactaagccttaacctttgacatcccaagggtctctttctcacacccatattcctcggtgactaaactgaaataaaacccctgaacacggacattcacatgcgtttccacttcatggtcgtccccacaagctccccatccggattcacacgcagcatcaggctttcaaggctacagtagcagctgccaaaggctgaacacgtatcagaacctacttccgattctggaattctggtgctgcaaccccatccttcgccatctctaagaacaccgagagactgggaggcgggcttccggagagggatatgggacatttcccaaagtccaggttctggctttgaacattttatatgaggtaacatagctgttttacctcatagagcatattatgtcatttctgatgggagtgaccgtagattattagtggagtgatagacacgcacatcaacagaatagagtcaagaaatggacacaagaacaggcaactgatttttacaaatgttcaaaatcaatttaatggaaagaggacagtgttttcaatactgttgaatcaactgggcaaccataggctgaactttaaattaacccttaccctatatacaaagatgaatttaaatggatattgctaaatattaaaaagcaaaactggctgggcgtggtgtctcacgcctgcaatcccagcactttgggaggctgaggtggccagatcacgaggtcaggagatcaagaccatcttggccaacatggtgaaaccccgtctctactaaaaatacaaaaattagctgagcatgccggtgcgtgcctgtaatcctagctacttgggaggctgaggcaggagaatcacctaaacccaggaggcggaggttgcagtgagccaagatcatgccattgaactccagcctgggtgagagagtgagactctgtctcaaaaaaaaaaaaaaaaaaaaaaaaaaaaagaagcaaaactacattattttgtcaaaggaagtggaaaaagaattatcaattacagtaaggaaggaatacttagatgtaatgccaaaaccccacaatccattaaaaaaaaaaaggctgggtgcaatggctcacacctgtaatcccagcactttgggaggccatggtggacagatcacctgaggtcaggagtttgagcccagtttggccaacacggtgaaaccccaatctctacaaaagtacaaaaattagtgggacatgatggcaggtgcctgtaatcccagctactcgggaggctgaggcagaagaatcacttgaacctgggaggcagaggttgcagtgagccgagatcatgccattgcactccagcctgggcaagacagcaagattccatctcaaaaaaaaaagttggacttcatcataattaaaatctttttctctgagagaaaaaaagaaagaaccacatctatggaaaaatatttgcaagtgatataaaacctttatccagctggataaaatctttatccagcattaataaacaatgctctaagcagcgcacagtggcaaatgcctgcagtcccagctactctggaggctgggacagaaaacttctcaagaccaggagtttgagactgtagtgtgctataatggtgcctgtgaatagccactgcactccagcctgagcaacatagtgagaccttgtctcttaaaaaaaaaaaaaaaaaagcctttagggaggtgcaaatggaaggccacatacaattggtatgtttgtattcataccaatacacacacaatagaataggtaaaataaaacattccagtcctgcgtggtggctcacgcctgtaatcccagcacttcaggaggctgaggcgggtggatcacaaggtcaggagttcgagaccagcctggccaagatgatgaaaccccgtcactactaaaaatacaaaaattagccaggcgcagtggcaggcacctgtaatcccagctactcaggaggctgaagcaggagaatcacttgaaccccggaggcagagggtgcagcaagccaagatcgtgccactgcactctagcctggtcaacagagcaagactacatctcaaaacaaaacaatacaaaacaaaaaaaatactgacagcatcaagtggaagaatgtggagcaactgaacctttctatatattgttggtgagcaatgaaacaccactctggttagtatcttacaaaggtaaacatacacttaccttatgacccatgaatcatactctgcagtaattatcctagagaagtaaaaaattgtgctcacacaaagcctgtgtgtacaaatgttcataggatttttatttgtaacagtaagaaaaaccgggaacaaaactaatgtccttcagtgggtgaataaacaaatagtggtatattcgtatcatagattattagtggccaataaaaacagaacaatgatatgcagaacaacttggatggatttcaggttaatctgctttagttgaaatagccaataccaaaagggtacatgctgtatgattccatttttataacatgctactaatgacaaaactaaagatgaaaagatttctgattgccaagggttagggctgaggagaggttgtgactataaacaaggagcatgagggagtttgcattgatgcaacattctgaatctcgattacggtggtggtgacatgaatcaatatatgtgttaagatttcttaaagctacatataaaaaacaaacaaaaatgcatgcatgttaaaactggtgatttccaaataaattctgtagttaacagtattgtaacaatttcactttcctgtatttggtaatgaactatgcttatgtaagttgttatctttggaagaagctgggttaagggcaagaactctggaatattttggtaagattttgtgaatctaaacttatttcaaaataaaaacttacaaaaacatcttatttatattaatttcataacacctgatgttacttataaacttaaacatattcaagtatggtcaattacacttatgaactgaatatactgtatccagtttcattctgaagtactttagttattctgaaataacacaaacttagaaccaaagaaatgcaggagctaatcatataataaaatgaggcaggcataaaatactccggtattatatacaatattaaattttagttcgtgattagaggaagtcacaatttaaaatgtataaaatcagtgacaaggcaactaggaatatggctcaagctatcctgttcccaaatgcacatgaggcatattatctgttaaggttagaattgtgacagaaagctctcatccatcattttgccaaggcttctttccttcattaaattctctgatattttcctaaaagtcttctacattgaatgttttcataagttttttctgcattatttcctagcacacgatgaggcaaaacattttactgaaaaccctgccacaggggtttgccagaggaaagtatttctccagtgtgaactctctcaatctgttgaagttttatttttgggcaaagacgttcctataattattacatttccacgaattagtagtttattcatgatctatgatcacttctgagggggtttatcttcccaccaaaggcttttatagtctgccacattcataggatttttctcagtatacaatttttagacataatgtcctaaaatattttctcaaatgttttgtacatgttttctctgacacaaaacatgaagtaactgatcactaaataaacaaccatgtagtctgcattcatgaaattactcttctttgcagatatcttaagggcctacatctggcaagaggctttcccaaaatgactacctgtgaattctcctgtgtttaacaaggatagacaagtgcgcaaaagctttcccacaatcactacatccatagggcctctctcctgtatgttttctttgatgaacattgagccctgattttgtagtgaaggctttcccgcagtcactgcatttgtacggtttctctcctgtgtgaattctctgatgtgtaataagatcatttttgcgcaaagagaattttccacattcagtacatgcaaaggaagtctttcctgtgtgaaatcgctgatgttgtatgaggcatgtcttcttcctgaaggttttatcacattcattgcatttgtatggcttctctccagtatgagtttgctgatgtatactgagagtactcttcatggtgaagccctttccacattcattgcatatataaggtttctccccagtatgagttcgctgatgtgcaatgagcatgcttttcccagttaagcctttgccacattcactgcatacatagggtttctctcctgtatgagtgcgccgatgtacattgagatgactcttctcagtgaagccttttccacactcattgcaaatataaggtttctctcctgtatgagttcgttgatgtcccattagccggatctttgctggaaagccttttccacactcaccacatacatagggtttttctccagtatgagttcgctgatgcacaataaggcggctcttcacagtgaagccttttccacaatcattgcatatatatggcttctctgcagtatgagttcgctgatgtacaatgaggtcactcttcatggtgaaaccttttcgacattcggtgcatacatagggtttctctccagtatgtgttcgctgatgtctgatgagtgggctcttcaaagcgaagccctttccacactcattgcatttataaggtttctctccagtatgagttcgttgatgtaccatgagacagtgcttcattgaaaagccttttccacattcactacatgtatataatttctctcctgtatgagtttgctgatgtgtgataagactgttcttcaaggtgaagcctttcccacatttattgcatataaagggtttctcaccagtatgagttcgatgatgtgcagtaagacgcctcttctcaatgaagccttttccacattcactacatatataaggtttttctcctgtatgagttttctgatgtgtagtgagactgaactttgtagagaaggccttcccacatacactgcatccatggggtttctctcctgtatgagttcgttgatgataaatgagccgacacttcttgatgaaggctttcccacattggctacatgtgtaaggtttccctcccatatgagttttctgatgtatattgagctgtgatttcttgaggaaggttttgtcacattcagtgcattcataatgtttcagttctgtatgagttctctgatggtccattagtctggattttctggagaaagctttcccacacatactgcatacatgaggtttttctccagtgtgaactctctgatgatcaataaactgagacaacttgaggaaggctttcccacattcactgcatacatgggcattctctatgttgtgagttctctgttgcttaatgaactgggacttattaataggttttgcaattgcaggaaacttcatttcagtataaaattgtttatggttagcatgaaaaagggatttcccatctctattaaactcagcagagttctttaggccagagctccttttctggttttcaaaacttaaatttgattttaaaggtttttcatgtaagtcaaacgtatcacaatcttgcttcagcaggaaatgacctttgttctgattaacaatatttccaaacatattctgttcatggcactgtttcacactcttctgaatactttgattttgcaagtgatgctgcagaggatcatcaattttcctgatttctaggaaagaagagaacagtcaatcactccatcatcttgttttgaaataaactatttaaactattttttaaaactgccttggtgtgaggtgactctttagtgaaaaccctattttatttatttatttttttgtgagcaataaagctttttaatcacctgggtgcaggcggactgagtccgaaaaaggagtcagaaaagggtgataaggggagggcagttttatagcatttgggtaggtagtggaaaattacagctaaagggggttgaaaaccctattttagtataaaggaaactccatgtataaatatccctcatctcttacacattgggagagatgtgtaagattccttttatctcttacacataaaggaaattccatgtataaatatccttcatttcttacaaataaaacacaataatataaacacaccgaaaagtaaaagcaactgtacaaacaaggctagataattcacaatgtatatagatttggctgctttctaaataggtctttatacaatacacacatagtcaaatataaacaggtcactttttgcagggaaccccaaaatttggcaggataccagaccacagaaataaagagaaatatcagaccacacaggttgatcccaaatgacaaaggctgtattaatttattctacaaatgtttgctgaatgacatctatgtgtaagtcactatgctcatgtttgggatatacaaacaccttcctttttttttttttttttttttgagacagggtctctgtcaccaaggctggagtgcagtggcacaatctcagcttacttgcaactataacctctccctcccaggctcaagtgatcctcccacctcagcctcttgattagctgggaccacaggcatgtgccaccacacccagctaattttttgtatttttggtagagatgggtttttgctgtgttatctaggctggtctcacaagctcaagaagatccacctccctccgcctcccaaagtgctgggattacagacatgagccactgcactcagccaattttcacgaaggtttaattttagttaggaaaaaatgaaatcacaaggaagcaaaaaaataaagaaggtaattgcattttgtgaaatgtggttaatggaacaatggagatataagaggtggagaaaatcaagatatagttaaagaaatgacaaggttcactaataggttcaatgggacgagtgaaagagggttaatggaagtgaggactcaaagattattccaaaaattatatggtttcaggctggatacagtggctcacacctgtagtcccagcactttgggaggacaaagcgggtagatcacatgaggccaggagttcaagaccagcctggccaacatagtgaaactgtgtctctactaaaaatacaaaaattaggcatggtggcacatgcccgtagtcccggctacttgggaggctgaggcacaagaatcgcttgaacccaggaggtggaggttgcagtgggctgaaatcacaccactgcactccagctggggtgacacagcaagactctgtctcaaaaaaaaaaaaaaaaaaaaaaacgcaaaactatatggcttcagccattggataggaagaaaaaacctcatgatgaaaataggaatattactatctggaatgaagggaaaaatttagcatgccttgtgaaacacataaagtttaagaccattaccacatatccaagtacaaacatgaagaaattggttgaatatataaatctcgaaaaggccttatctggaaacagcaatgtagatgacatccaacatttacaaattattcaaagaaagagtactggatgagactttagttggaaacatgtagaaaaaaagaatgaaggcacagggccagggatcttgtcaatccaacatgtagagtttgggaattcgttaagtccactgaaatgaaccatacgctgactattatgatcaggtgcacaagtggagacccaggtgtacaaaacaaacatctaggagtggtaagaatgtaatagcctcttgaaaattgctaaaatagattttaagtgttctcacaaaaaaagtaagtacgtgaggtagtatatacattaatttgttcaatttagccattccacaatgtacacatatttcaaaacaacatgttttacatgataaatatatgtattttttatttaggaattaaaaagtaatcatgtcctggtgtggtggttcatgtctgtaatcccagcactttggtagggtgaggcaaagaggatcacttgagcccagaaatttgagaccagcctgggcaacatagtgagacctttctctataaaaaatacagaaattagctgggtgtggtggcatgtagtcccagctaggctaaagtgggaggatcacttgagcccaggagattgaggctgcagtgagccatgattgtgccactgcactccagcctgggtaacagagtagaaaaataaagaaaagaaatcataaatttaaaaaacagaagaatgtgagatcctcagcatttgatttaaagtgtcacatgctgagtgattatcacattccccaaacttgctattcttcttcattctatgtaccaccattaaactaattttcccaaagcacaatctcaagtttagatgaaaggttctatacttaagactccaactaatgacctaactggatcatactatcccgtgttgctacagaaagagggaacaatgatttgcagcaaagtgttaactcagcaggcctgggctattccatccctacacattccaaagaaagaactcgtcttaactgccttctaaaagataacctctgagcccctggaatattctgcctgctaagggtatcttttaatgcctgaggccttgggtcatatcagatagtttatgctagcaatgtgatttatggtggacacctggttttgcatgtctcaggctttgggccacatttgtattgttttgactctgggtggctacagacactgggcttagatgagcttccctagttggcaataacttcacatgtgttgacaaacactgttgcagggaaaattcagcactttgtgcaactccactagaacaggagaactgaaagcttgcacccagtttctcctggattcttctttctatactttttatctttgatgattttaatttgtattatttcactgtcacaaactgtaatcatgagtgtagcagttccctctcctccccattaacgtctaccttctacgtagcaggcaaagtaatctatcaaataaattagttatatcatgtcacttctctactcaaaactccctactgtgttctcaactcatttggaataaaatcaaggtcatgaatgcccttgacaggcagtatgtgacctctgtaccaaaacttccaactatgcccccactgttcttatttccagacagttttgcttttgctcactctactctatccattcaagcttcctagaagttcctcaaacacactccagggtcatttttcaacttctcattgtctcacacctggaacactcttcatccagggagcctacacgtgttcatcatctatctgctcaaaggcaccttaacaaagagctgttcccaccctacaagcacagtgccaactcctaacacttactgttccaccagctgctttaactttccttatagcaatttttactccaagatatgttatttatatatctgcttattactggttatatggttacttctaagagaacaaaagcattgtgaagaataaggacatggtatgttttttctttcttatttgtactgctgatagcgttggaatatagtaggctatcaaaacacaagttttgggtgtgtggtggaggcaggggggtttgtcatccagcctggagtgcagtggcatgaacttggctcattgcaatgtctgcctccagggttcaggcgattctcccacctcagcctcctgagtagctgggattataggcacataccaccacacccggctaatttttgtatttttagtagaaacggggtttcaccatgttggccaggctggtctcgaactcctgaactcaagtgatccatctgccttggcctcccaaaatgctgggattacaggcatgagccaccgcgcccagcccaaaacacaagttttaaaggaaggaatcatatgacaagaaacatgattaactgggactaggtgtcatcaaaatatgatagaaaagtaattaatgttatttctatattctagcaatgaataatctgaaaatgtaatcaagaaaacaattccattaactgcagaaacaaaaagaaaactatacttaggaatatacttagcaaaggaagtaccaaatttatattctgaaagtgataatgcattgtcgaaagaagtcaaagacctaacaggatataaaactgtccagtgttcatggatcagaatacttaatatgatgaaaatgggaatactccccaaaattgttacacagactcagtgcagtacctaccaaaatcctagccactctttttgtagaaatttacaactgattctaaacttcaaatggaaattcaaaggactcagaatagtcaaaacaaccttcaaagcaaagaacaaagatggaggactcacacttcccaatttcaaaacttactatagaaccataatcatcaagactatttgataatatatatttatacatagtatatgttccaaaattgattgtggtatggttacacaactaggtgaatagattaaaaaccactggcttatacaccttaaatgggtgaaatcatgtgatatgtgcattgtatctcaataatagtttacaaatatgatgaaaaaagcaaaagctatacagaaatgaatgcagtcaaaacatctaacatgaattaaagaaagttcagaattagcaaaactatgaaggaagtaatttgcagcaggcataaatgtctgatggtttgggctagaaataatatacgatattaaaagatcttttctaattaatcaaaacattatcttaaagtagagaactttaagagagttcagcatgtagaaaacacttaaggtaatgccagaatttaagatgtgcagtaatgaaagagaccctggatttaaacaggacagcctgcagcacgattcacaacagcaaagacatggaatcaacctaggttcccatcaatggtgaacaggataactgtggtatatatacaccatggaatactacaaagccataaaaaagaactaaagcatgtcatttgcagcaacatggatgcagctggaagccattaccctaagtgaaataactcagaaacagaaaaccaaatactgtgtattctcacttgtaggcaagagctaaacattgggaacacagggacatcaagacaggaacaatagacactggggactccaagaggaagaagggaggaaggcaagggttgaagaaccacctatttggtactatgttcactacttgggtgacaggattgagcttctagtgaatcctcggcatcaggcaatatatccatgagacaaacctgcatatgcacctcctgatgcacctcctgaatctaaaataaaaacataaaagataaaataaaattaaaaaaataaaattatataaggatagccaaaagcattattcttagagggaagatgattcttgttcctcatacacaaaatgggaagttacaggctagttgtcatgaagacaagtaaaatacatggaaataaagtatacattagataatattaaggcagaagttaatttggtagtctcttccagagaatgaagagttaattcacgggaatgaaaaaaacttttaaaagttatgagaacagtaaagaaaatggaagaaggatgggctgggcacggaggctcacgctgtaatcccagcactttgggaggccaaggctgacagattacttgagccaaggagttcaagaccagcctaggcaacatgacaaaaccccacctctataagaaatacaaaaatcagctgagcatggtgatgtgtgcctgtagtcccagccacttaagaggctgaggtgggaggatcgcttgagccgaggaggtcaaggctacagtgagcctgggtgacagatgagaccttctttccaaaaaaaaaaagtatggagaaactcaggattcagtataagaggaataagagaacttaagaaacacataaatgccaatcagagaccaggttatcatgggcacagcatccagagtggagaaaatgagggaaaataatgattcccagagtgggaataatgaaggaaaattattattttcctactagggcaggaagatgcagtagtcagaaaaaagtaatgagttcaaaggtctctctttccggagaggcctggaaaatggaatttcatagcaagagaggtaatacacaagcagagacactgtgacagtggacaagaaaaggcagatttgaaaatcctaagaagataattatgtagacaaaaacaagatgtgcataaaataaacaaagatgaaatctcaaggaaaaaaagtgggggccgggcgcagtggctcaagcctgtaatctcagcactttgggaggccaaggtgggcagatcacaaggtcaagagatcaagaccatcctggccaatatggtgaaaccccgtttctactaaaaatacaaaaattagctgggcgtggtggtacgcacctgtagtcccagctactcaggaggctgaggcaggagaatcccttgaacccgggaggcggaggttgcagtgagccaagattgcgctactgctctccagcctggtgacagagcaagactccatctcaaaaaaaaaaaaaaaaaaagaaaagaaagtggggcatattttccatactataacaaaaaagagctcttccttgggaagaaggagtgatggaggggctgttgctgtgtcctcagatgccctcactgctttgacgcctgctctgtgtgggcagaacatggtgtctgtggctgtccacctggctgctcctctcactcaccagaacagattcgagagtagatttcatcttctgttgtgcaagtttcttctcctcgttccaatttggagagtgcatctggtttgctggcttgataccctgttcatgggaaatgacagaagatttagacaaatcaaacggggctggcaatattgaaaaaggagagttacattttaaggactacataggtatcagatctgtaacaagaaggtagattatactctcttgtgtggggcaagagaatgatgtgagaatctaccacttcagagtactgcaggtaagcagctgagaaaggaaggccactgactgggcaccctctgagtgacacagggcagctgtcctcacccactgccaccaggttgctgtagttctccaacatcacgtcccggtacaggtccttctgagcagggctcaggaactgccactcctcccaggtgaagtccacagccacatcctccagtgttagggattcctgtaataacacacttctgtttaatgaagtcatattcttttggtgataggaaaagaatgtcaaggaagtcattccgctcattttcaccacataggaagctggtggggtttttttcttagtacattttgacagaataagaattccagtaaaatattctgtaactgtgcggtcatccattcattcaacaatgttgaaaagtcaaagaaatgtctgtaatacacagctatccaatcctcttgctaatgaaagaacatctataacatgtagcatctatttcccaataccaaactagtcataagtatatgccagttacaagtagacgaataattcagattcttaaattcactatgagctttcaggccaatatcaaactctgtaatgaagacatggcagatgctagtatcacaagacaatgcattctaaataactatggttaacatagttaaccatattattattttattctgaatgaaataaaagagactatataaaacatgtataaagcacaaagattattagatgattaaacaaatctgtttttttgcttgcttgtttttttttttgagatggagtcttgctctgttgcccaggctggagtgcagtggcacaatctcggctcactgcaacttctgcctcccgggttcaagcaattctcctgcctcagcctccctagtagctgggattacaggcgcacgccaccacacctggctaatttttgtatttttagtagagatgaggtttcaccacgttggccaggctggtctcacactcctgacctcaggtgatccacccgccttggccttccaaagtgctgggattacaggtgtgagccacagcgcctggccatgattaagcaaatttggaaaaaaaaatccttagaatatatatgcagacacatgtatgcacacagacaaattcatatatatgtgtatgttattagacagcgttaataacattaaatacaatgaagaaacagctaaaagaaatctacttttgcatttatgagaaggctacagttaagaacaccacctaccataacacctccgtgaagaactatcaaagatgtatttgagcctcagaattataagccatgaaacattaacatccctcaagaaactggtctgctttctcacagttgatataacttatcatgtttctcttgtatagcttgtcagagatactagaggcaagtttacagcaaatgtaacctacggggtcccacacagtcacaaattccaacatgaatcatgtagtatgaatcctatgaataatatatccctgatccttctttgcccagatttctccaggtcctgatatttccaatttatacttttctgattaattaccctgatttttacaggactttaaaaatacattggagaataaaggaaagaataaaacaaaccaaaagtcacctgggcctgcatcattgtctcctaaatttgggaaatgactgctaacttggacgttctgtatttgtctcttctgaatcagctctaaatttcggttcaaaaacttcaatctccaatcaaggatgtccccagaaatgatgacacccaagtcttggaaactccgcctccttccttcacttgatttctcttgttctcagcacctgtgggctgaagagcaaattactctgagtggtacattctttttaggcccagatgttgtcactgttcctatatgctcaccttaaatcaaggcccccaaatatctctctgttcttttatttagtgctccagaagcttttatatctgggctagtaaaatataacattctgaatatatgggaggtacagcacccttctatataaagttgacgtggtatgactactgctagtaagtgaaagagaatgtggggaaaagaatcgtcacaacgtgatgcccagcagctgggcaatcctcaggcagaccagttttaggaaagaggtcacatagacagttaagatgcacacattttttctttaaaaccatgtgtacccatctaccttttcagaggtctttttacattctaggatactgcaatctgagaacactgtcctaagcaaataataagcactatcttatttaaattattcattaccatccacatctttgactttttttcttttttttttgagactgagtttcactcactctgttgcccaggctggagtgagtaagactccagtggcgtgatctctgttcactgcaacctccatctcctgggttcaagcgattctcctgcttcagccgcctgagaagctgggattacaggtgaacgccacatgcgctgctaatttttgtacttttagtagaaacggggtttcaccatgttggccaggctggtcttgaactcctgagctcaactgatccacccatctcagcctcccaaagtgctgggactacaggcatgagccactgcacccggccgccatccacatcttgatacttgcaaagtattctaagtataaatgtataaaggatactcagcaaaaatatccttgaggaattacatattacagcaaatcctaacggatattcttcaagcaaaagaaagatgactccagtgtaagcagaggagcaaggtctgaagaggaacaaaacggtaagtaattaataaagcctaaatcagtattgactggaaaaataatactgataataatatatcaggaagttttaatatatatagtgttaaaatattccataagaacatataggccgggtgcggtggctcacgcctgtaatcccaacactttgggaggccgaggtgggcagatcacgaggtcaggagttcgagatcagcctgaccaacatggtgaaaccccgtctctactaaaaatacaaaaattagctgggcatggtagcgcgtgcctataatcccagctactcaggaggctgaggcaggagaattgcttgaacccaggaagcggagggtgcagtgagccaagattgtgccattgcactccagcctgggtgacagagtgagattctatctcaaaacaacaacaacaaaaaagaacatataaagtaggaggatggcaaatgaaaacgtattttaagatatctgcatagcagaagagtataaaatactaattaccataacattaacaaataagtttatatgttgtttgtaatcaatagtgtcagcaataaaactaatttttaaaaaattatttccatgttaaaagagaggtctatggtttccgtggcagctactcaactctactgttgtagctcaaaaatgcccacatacaaaaaaatagacaaatgattgtggccaggtcccaacaaaactttattaacagaaacaggtgctgggagatttagtccatgggctctagttgcccaactgtgaatttgtgcagaaaagccatatggtcacctaaatcaagagtcagtaatatagtatccaggacctggaccacctgttttgtaaataaagtcttataagaacacagctacatgcattccatgacatttcatctcaggctattatcacattacaatggcagagttgagaatttgggtctagaatgtcactcagtagaatgcagtataaaaaaataatcaaagatgacttttgaatataaggggcaaattatcagtatttgcctaatacgtctgtattcctttagtcaggtggctggatacaaaatttaaatagaaaaatcctatatcctcctaaagcatatacagatcgagtcagtattaagagcagaacctttcttgggaacaatttaacattctattgaaaattgccaataaaggtatacctggtaacccaaaaccccattcctaaaactttcttaaaaggtaatattggcaaaagtgtgctatctgacaggtcatttttactttcttcacttgatttttcatagggaaaacacaggtttacatcagaaaaatattagcattctacatttaaaataaaattgctgatggtagttcagtaatataagtttacggctttaaatgttttcattaatagaaaaaagagagaaaccaggcgggaggaagggagagaaaaaaatgaatataaatacaaattttacaaaagacaaaaccaaaaataatcctcagagataatcgtgaggaaaagatgtttaactcctcttttggccaacaagtaaagcgacacaagttatgccaatcacacaatgagcaagaagcagaatcagggctgaaaatccacttttgtttcacttcaaaatccacttttactctactttataccgaaccaaaattatctgtaaatcagatgcctccctattaagtaaataaataaagcaattaaagggctattagtagaattctagttaatcatatacagaattatttagaggaatggtacttatgtctgtaacttactttgaaatataccaaaatcgacaacaaataaggaatgattcacaaacagaggaatggatgaatacttagaaaaccagtagagctgatctaatacaatgttaatggtaaaagctaggtggtaggcatattggtattaacattaaacttctttcaatatttccataggttcaaaaattttcacaaaataatatgttaggcagagagaaaaatattgtaatactaagaattaagatgaccaaatataaaataaatatttaaaattaatttatcttttgttatagattataaggaaaggggagtcagaaagcaatacactgcaataaaagtaatagtctagattgaagattaaaggcaggaaaaacaaaattcatggataaatggataatcataaaatgttcctaaaaataatacctaaacattttaaaacatttcacttctatccaaatgtacgcataaacttaatgtgaatgcacttatagtaccaccggctcaaacagtaaaaacaacttctaaatgtttattacataatataaagcgaaaaagataatagtaccatttacataatttatctgaattatgaatattaagcacataacatacacgtctaaaattgaaatattctgaaaatttgacaaaggttatctttgagtaaccgagcttaccatggcagagatgttatcttacttgtgtcagaaagaacctgaaaagaaatatccaagaggatacgctggaaacttgcaggacaaagggtagaagccgcatcttaaatataaaacatactacttttaggtatgctagatgactgatctcgccaaaaacttccatttctgaggattcaagaccaaggggtgatggaaggtgccaaaggggatttaaaaaccagtcgtggagaagggtcttgggcagaaggggaatgctaatgagcatcaattctgttccagcagccagggctggggctaacccatcacctgccatggttcccaggcctccagagctgcagcccacatcggaatctgtggcgctaccaccaccgccaccgggattaattccaaaacctggatcagaaacctccgtaccttaacccccaagacagttcctcaatcatttagtcccaaacaaaacctgaaccataaaccgattcgctgacaaaacaaaccctccagttcgcaatcactgagccccgccaaaggacaacaccaaagacaccagaatgtgacttgggcactcagtagcggatctctagagatctttaaccacaaactacacgaggaccctgtgactggtcccagaggtaccccgatcacacacacacacaccctatcacggacctcttgtagttcccctgcgataggaatcggacccacgctaagctcctgaaagaattccactggcgtcgccaaacgctggcgccgacagataccagtccatcaccactgtccacgaacacgcccagccacggacagaatttcctcccccgtcaccacagcgaccacccagtgactgaacttacttcccagaacttggtgggctccggcctcatctctcggcctcctcagtgcctgacggcgactatccagggtcggaggcgttcccagcgtttgcgcagatgcaagatggccgcgccctcgtcgccttggctccatgggggccgccatctttgagtatctgacgtacacaaggcaaagggcgcgttttggcgctggtgaccgggggtgaccgggggtgaccggggatggccgggaagatgaaagagcactgaaactgtcccatttcctggcacctcaacccttcataaatacgggtccatatacagaggctccagtttacacaagacaaaaatggcgtggaggtaaatccctttcagcagctgaatagaaggctaagatggccgcgacgtttacactttgtacaaaggttaggaaacagttccttgtgagggaaaaggagaaccggccgagaggggacacttcggccaaagccagatttctaacaaagtagcttgaagcgccttttgaacgcagaagagggctgttagctacgctgacggaacaggggtagcagtcacagactaggtaatgaaaacggttggaacgtgccaaaattatgttgggtgaaaggcatggggaaaagccagtaaaagccagaaagtatagttcccaaggcggaggggagagcctgggacccaggtggagccaaatatgagggctggactcaggagaagtggccagaaattaagggaacaggaccacttcagtgagaaaaaaaaggttgggaaagaggccgggcgcggtggctcacgcctgtaatcccagcactttgggaggccgaggtgggcggatcacctgagagcgggagttcgagaccagcctgaccaacatggagaaaccctgtctctactaaaaatacaaaattagccaggcatggtggcgcatgcctgtaatcccagctactcgggaggctgaggcaggagaatcgcttgaacccgggaggcggaggttgctgtgggccaagatggcgtcattgcactccagcctgggcaacaggagcaaaactccatctcaaaaaaaaaacaaaagaaagaaaggttaagaaggagatcacgttatactacgtgtgccaaccgcgaatagtatgtgcaaagtcatggcaatgctgaactgtaaatataaatccaaccaaacttcctatattagaagaatgagagaaaggaaatgcctgtgtgaatctatgtgtgtgatataggtatcagtatataaatatacagagaaattgtcaaactatttttcagagtcaagttcgtgttccatttgctcttctcacccttggtatatgagagtttttctttttttttgttttttttttgtctctttttgaggcaaggtccactctgttgcccagtctggagtgcctggggagatcacagctcactgtaacttggaactcctgggctcctgaatagctgggactacaggtgggcaccaccacacctggctaattttttaattttctgtagagacaagggtctcactatgatgcccagctggtcttgaactggcctcaagcagtcctcccacttcatcctccaaaagtgctgggattacaggtgtgagccacttcacccttcacccggcctataaagagatctgaaaagaaataagaaaaaagatgggcgcggtggctcatgcctgtaatcctaacactttgggaggccaaagcgggaggattgcctgagttcaggagtttgagatcagcctggccaacatggcgaaaccccatagctactaaaatacaaaaaaaattagctgggcatggtgtctcaggcctgtagtcccatttacttggaaggctgaggcacgagaatcgcttgaacccaggaggcagaggttgcagtgagccaagatcatgccactgcaccccagcctgagagacagagtgagactcttgtctcaaaaaaaaaaataaataaaaataaggaaaagatgatcaacttaaaagctccctaaaattttctataaatacatgaaggaaataaacaggacactttttttaatgtaaatgatcctaaacaatttaaaaaataccagttttactaatattcaaacaaatgcaaagtaaacgtgaaatataaatgttttaacccttattaagatttgtaaagattgaatgacaaatcatatttagattataaggccatggaacaaaggcattctgttatgctaagcctctttaagtcttctttttctgcatggtaggtaataatgttgtcaattacatactgctttaaatgaattgagatattatcatactggtcataattcgaagttcttaagcattacattatttctaggtataggattgtgtttctatataaattcgtaaaatgtttttgtagtacagtctgttattacccagtttaaacttttccttctccttgagccatgaattttaagaattgattcaatagaacttttctttgtgagaacaaatatgtgcaaggatatttatggtattgatctgacaattataaggaaacaaatacttttgtggttattgcataaatttattcttgcatctctatattcacatctttggatagtattctccatagtgactgactaatgtgtccaataggacagtagcaagtgtaacacaaatggaggtgagaaataagcttgctcatcaaggcttgcttgtctcttagagatcttccaacacattgtaagaaagcccagactagcctcttgttgactgtgtaaataaaggcctcatccattccagcagaagcccaaatatgtgaaaaaagctatttagaccatgcagccccagtcaaaatccaaccactagagcctccggcccagcagtcccaattgttactaaactctgtggacaaacataatgccatgagtgggtgggggtcacctaatctgccatccaagtgcttatccctgctcctagccaagcaggacttgccagcttgggtggtgtccaagtagggaggggccctcactcttggatcaccataagagttgagacagctgggtctgcaggacattggaaaagtcgggtgtgccttcctctgtagggccacctgggaaggatacagctgtctgcaaaccatgatgtctgcctgagggagccccatgagcagaggatgcccaaggccttgggaacccacgccttgcactagatttaatgactaccctgctgggttttgaacttgcatggaacctatagccctttcttgtggctttctcccttttggaatgggaatgtttacccaacgtctatgcccccattgtatcttggaagcaaataactttttattttacaggctcataggtagaagagacttgccttgtctcagataagactttggacttttgagttaatgctggaatgagttaagactttggggactcttaggaaggcatgatggtattttacaatgtgaggacatgagatttgttggggagggagaccaggggctgaatgatatagtttggatatttgtccctgtccaaatctcatgttgaaatgtaattcccaatgtcagccgggcgtggtggctcacacctgtaatctcagcactttgggaggccgaggcaggtggatcacaagaccaggagatagagaccatcctggctaacatggtgaaaccctgtctctactaaaaatacaaaaaaaaaattagctgggcatggtggcgggcgcctgtagtcccagccactcgggaggctgaggcaggagaatggtgtgaacccaggaggcagagcttgcagtgagccgagatcgtcccactgcactccagcctgggagacagagcgagactccatctcaaaaaaaaaaaaaaaaaaaggaaatgtaatccccaatgttgaaggtggggcctggtgggaggtgtctcagtcatgggggcagatccctcatggcttgatgctgcccttgcaatagtgagtgagtactagcaagatctagctatttgagtgtgcagcacctaccccctccactctgtcttactcctgctccctcttcaccttccaccatgattgtaagcttcctgaggcctccccaggaccagatgccagtgctatgcttcctgtacagcctgtagaatcataagccaattaaacctcttttcttataaattatccagcctcaagtatttatttatagcaatgcaagaatggcctaaaacatgctgtctctacaaaaaaaaaaaaaaaaaaaaaaaaagccaggcatgagggtgcacacacatagtcccacctacatgggaggctgacgcaggaggaacacttgaacccaggagtttgaggctgcagtgagctataatcgcaccactgcactccagcctaggcaacagagactcttttttttgttgtttttgtttgtttttcagacagagcctattccgttgcccaggcctggagtgcagtggcaggatctcagctcactgcaacctctgcctcccaggttcaagtgattcctgcctcagcctcacaagtaattgggattacaggcgccaactgtagagcgcccgatcctgtcactgtttggggcgccactacgtaacccacaaggacctagggggactgaaaaaagtgggggaaacgggaataaaagagacaaaagagtatatttggaagaagggatcaggggacaccttgcctctagtggacaagggccctgagctttacacagccctccatatttattaggcaaaagagatagtgagaaggcgggtggaagaaggggtcagctactcagtccagagtagggtttgcaagatggcattctctagatgtcccagtagataacctcaaggagctcagcaccaggaagcgattgccctcagcaaaccttctggcagcggaagcagtcatgagtttgcccacatcgtgcattcatgataaagtttgctgtttgatcatatagcctccagtggaatgctgagttggtcacatcccatgggccttcggctcccaacagcccagcaccatacccagctaattttttgtgtgtatttttagtagacacagggtttcgccacgttggccaggctggtcttgaacttctgacctcaagtgatccgcctgcctcggcctctcaagagaccctgtctcttaaaaaagaaaaaaaagaggttaagattgtaaatcctaaaaaaaaaaaagcaaaagcaaaagctgtatgtagatttcacagcatctttatttatagcacttaaaaccaggaaaacagtgcaaatatatctcataggtgaatggataaactactacatcaaatatgtatactactctcaaatataaacaactttcatctggttagatacatggtggtaaaaaaaaataataaaacaactattcatcaactcatataaaccttaggagtaatttgctgagtgacaaaaatgccaaaagcttacatactctctatcaataaaaattcatataacttatttatataaaatttataaaaaccatttacaaaaacaattttatttttatcatattcatgaaatgatgaaattatactgataggagaaaagtggttggcagagttaggtttggatggagtgtaagcataaaaaggtagcatgagggactttgtgttcattagttttatgtggttgcagtggttacacgaatctgtacatgtaatacaacttcttagagtacaaactaaaaaagaaaaaaacatgtaaaaattcgtcaaatccaaaataagattagtactttatagtatcctaccaatgttgtttttctggttttgataattatggttatataggatatttttactagaaattggttgaaggatactagcaaagcctctagactgcttttgcaatttcgagttcaaatttatttaagttgaaggtggttttataaactgatcatctctataatcttagttaagcaagtccaaatatgttgttaatatatttaacatattcagtttcttttctacttaagtttgcttaatgtacaattaagctcagagccaaagaaaggaaaagagctaatcataatatggggtggttgttctggagtattttctgacacaaataaattctctaattctcccacaccaattgggtgttctacaattcaattctgaacaactgggtgttctataattcaattctgacactaacttctccaagttagtgcagactccacaagttagtgcagtccaagttagtgcagtgcaagttagttagtgcagtctaaattagtgcagactccacaagttaaggggctcagtccaagacttcccccacatcagatgccactcacaaggacaacctgcagttctgaatggtgataaattccgagttcccactgccctactcaggtttgataatttgctacagggctcacaaaactcaagaaaacagcgtactttgttttactggttataaaggacgcaaatgaacactcaaatgaagaggtacatagagtaaagcctaaaaagggttctcctaatctcaggagcctctacccctatgaagttgggggtgcaccaccctcttgggctatttggagttctcttaatctcattgtctaatctaatctccagcacccctccccttccaggaggtgggagaaatggggcacaaagtctccatcctctagttacttgatcttcctagagaacagccccattctgaggctgtctaggggagcaaccataagtcacttcagtagtataatcaggtgtaattaaaagggcagtgctatgaataacaacaacagcaaaaacaaaacaaaaccaaaaaactcttatcactcatgaaattctaagcgttttaggagctctatgccaggaaccaggaacaaagaccaaatgtatttctcattataccacaattttacacaacagtaaaaataaacagtaatgagacagtatattatggaatcattggcaaggcaactagaaatgaggattaaggtatcctgactgaaaatgcacaccaggtgtattagctgatgtttaaggttatacttattaagaaaaagcactcaaatattcatcattttcaccacatttcatgccttcatgagctgttgatagtttgctaaaggtgttccacatttatttgatagcatgttcggaacaattttactttctatgtgatctcctgacaaatgatgaagcagagtgcgtcgctgaaatcctgccatcaatactgtcaccttaaagttattttccagtgtaaactttgacactcactgaggtcatatttctgagtaaagactttgtcatggtcatcatgtttctatcaacaataagctcacttacgttgaaatctatgatgaaacctgataataaagtctatctttccacagaagacttttcttagtctttgtattcacagaatttatctctgtatacttttcagacatatgagcagaaattattgctcaaaacatctccacattaatatagtttattcaacgtattttcattgacagaaaatatgaggtaaaagaccactaaaggcactaccttatttactgtattcatcaaattgatctctagggcaaattatttcacctcctgaggacagacacacatctgtcaacaggcagcaccatgtttatgttccaattggctagaaacacactgatgtttaatgaagtctgagttgccacaaaaggcatttccatagtcacggcactagtagggttttcttctgcatgagttcacttataaggaaggagctgtgactctccattacaggagttttcaacttgactgattctacccatttctcttgtgtgcattttcttatgtttgacaaggtttgataagtgggagaaggctttctcacaatcactgcatccatacggcctctctcctgtatgcgttctttgatgtacattgagtactgactttgtggtgaaggcttttccacattcattgcactcataaggtttctctcctgtgtgaattctctgatgggtaatgaggccatatttgtgtgaataggattttccgcactcggtacatacaaagggagtctttcctgtatgacatctctcatgttgtatgaggcatattttctggctgaaggctttaccacattcattgcattcatagggtttttctcctgtatgagttcgctgatgtataataagagtgcgctttgtggtgaagcctttaccacattcattgcatatgtaagatttctctcctgtatgagttcgctgatgtataacgagagtgcgtttgacagtgaagccttttccacattcgctgcatatgtaagatttttctcctgtgtgggagcgctgatgtacaatgagattgctcttcacggtaaagccttttccacattcactgcacatatagggtttctctccagtatgagttcgctgatgtacaacaagatagcgcttcatggtgaagccttttccacattcactgcatatatagggtttctcccctgtatgagttcgctgatgtacaatgagattgctcttcacagtgaaaccttttccacattctttgcacacataaggtttctctccactatgagttcgctgatgagcaattagatagcgcttcattgtaaagccctttccacactcactgcacatataggatttctcttctgtatgggtttgttgatgtgtaatgagactactcttcacagtagagccttttctatattcattgggtatacagattttgtctgttgtattagttttcagatgcttagtgaacaggacacttctggataatttctcacattgaccacttccaggattctcttgtatacaaatgttctcatggtaaatgagctgagacttcctaaggaaggtttgctcacattcaatgcatgcatggggtttctcaattttctgagtcctctgatgcttgaagacttggaatttagtatggatacattttgcattttcagaaaatctagttttagtatgcgtacgttcatgcttaccatgtagaagtgttttctcacctccaataaactcaacagggttatttattccatgtcttctcttctggttgattaaacttaaacttgatttcaaattttttctgtacaagtcaaatgtatcatgattttgcactataggaaaatgtgtcttgctgagatgtacaatatttctaagtgtattctgtccattgcattgctgcacgctcttcagaagtctttggtttggagagtgctcttgcagatgactgtcaactttcccgattcctaagaaagaacagagtaacaaattcttccatgagaattgtatgagataaaaatgcttatgaggccgggcacggtggctcatgcctgcaatcccagcacttggggaggctgaggcgggcagatcacgaggtcaggagttcaagaccagcctgaccaatgtggtgaaaccccgtctctactaaaattacaaaattagccgggcgtggtggcacatgcctgtaatcccagctattcaggaggctgaggcaggagaatcacttgatcccaggaggacgaggttgcagcaagccgagattgggccattgcactccagcctgggtgatagagcgagactcagtctaaaaaaaaaaaaaaaaaatcttagcttatgagatgatttgctgggggctggctctttattgtcaactctacgatcccagtataaaaggaaattatgaagatataagctgaaatatatccaagaaatcagatccaagaaaagacaaaaagtctttaaagctataacagcattaaaaaagttatcagatggggagatgaatatatagtggagctgcttaggtaccctcagatacttcatatatgtgacacctttccttaatgactacaataagactcctatagccactgtccttgctggttctcacttacctggacaatttttattctgaattttagcatctgttgtccatggttcttgtccatgtgccaacttggagagtacatctggtttgctagtttgataccctgttcatgaggaaagacaaacacaaacatcctgaattggagtccagtatgtcaagatggaaaaataatacattcgatgaagaaaacaatttcaaagtaagcattctgtcttagaagagattataccactttggggtcagagaggggactgaaaatgtaactcttccaaacaccacagtgactgtaaagctttgattaggtgagcataggacggtgtctgggcattgtaggcacctctaggtgacacagggaaactattcttacccagtgatactaggtggttatagttctccaccatcacatcccggtacaggttcttctgagcagtgtccaggagctgccactcctcccagctgaattccacagccacatcctccagggtcagtgattcctgtaattacaaagtcctattcaatatgatataaactcctattgttaatatagaagtataagataattttttaaaaattttcacaatacagcctgcatctatattcctttctcaaatatactttggtaggagcaaaatcctctatctatacattttagcgcctatttctaaatattaaacgtaggcaaatgacatcaggacaaataaaacatccctacattaccaatgacttcacaaccaatataaggatctgtcatgaatagacttcacatcttgaattcataaaatagtgcttttaaataaatgtaagagaaaagatgaaactatatctgtataaagcacaaaaggcccctaaagttgattagatttttatttattttttaatttttaaagagagatggtcttgctctgtagccccaaatggagtgcagtgtcacagtaatagctcaatgcaaccttgaactcctaagctcaagcgaccttcccacctcagcctctcaagtaactaggactacaggtggatgctactaccaatttttgtagtgacagggtcttgttatgttgaccaggctggtcttgaagtcctggcctcaagagatcctcctgcctcggccttccaaagtgctgggattacaggtgtgtgccactgcgcccagcaaaaaaaaacttctaacagaaaaacatatatacatatgtgtattaatggacagattaacagcatattagatacattgaagattattggtgaattggaatatataagtggaaatggcagaaaatgcagtacagagaaaaaagataaatcataacaaagaagttaataaatatgaaatacagagttgcaagacctagtgtatgcccacttatggtttctaaaagggaaaatagtgtaatagagaagcaatatctattaataaatatccaaaacctaaaatatttcagaactaaatacctcaaatctcaaattcagaaatcccaacaagttcagagcaggaagtcacaactggtgtgacacatcagactgaaactaccatacatcaaatgcaaagggaaaactatagaatcatcaagagacaaaagacagattacctacaaagaaataacaaaatatactgatggctgacatttcaataatagaatccagaaacgtatggaatacaatcttcaaagtcctaattcttgcaacaaaaaaggccaattttggaaggccatttgggattaaaacacatggctagcagatgacttgctgtcttacaaccatgatatcaaggacctgtttgtcaactaaactgtcattctcctgcttcacaataacttttcagagaactgcagagtgtgaagtagaggtaactaagatccaaggaaatactgataagagaatctatgctatattactgtgtgggatgctgcatagtcaagaaagtagactcatgagagtgcgcaagtgctcaagcctggtcagtttatctcattccaaaatctttatgtgagatgtctatcgactgggtaagtgtaaagttaaatttctacctcactccacagtccaaaagaatttattactggatggaaatcttgcaggccaactctaaggtgtcctctgataatctcattctctagctgcagtgacttctgacatcaactacctgggttaggccaaacttcccaggttaaaagcacaatcctccacaagactgccctcacttcagacacaagctgcaagcttaaggctacacagaccaccctcaactccagcgagctggctacaaatgtgtggagctaccatgactccctcaggtttaataacttgatagaacaactcagagaacccaagaaagtgctgtgtttacaattagcactttactattgcaaaatgacacaaatcagaatcagctaaaggaaaatatgcacagggtgaggtctgggaaggttccaaacacaaagctgctgactgtcctctcctcatggaatccttggtggcattacatcttcctgactacattgtgtaacaatattcaagagtacttgccagccagcgaggcgcacctaaactttgatgtccagagattttattgagacttcatgatgtaggcacagtttattgaagcattgcccatgtagctgagttcagtctccagttccctccccttcctgactggtattacatggctcaaagccacaactctctaatcacttagtgcgctttttggcatgggcagcccctatccagagtcatgtcattgccataaattatctagggatctactatgagtcaccactatacatatagatataaactatcaaatatgagtggcccaccatgaatgacagagacactcataacttgggtaattacaagggtttagaggttacctcccaggaacgaaaacaaaggctagccaaattctttattacactctaggtgttcctgcccctgtgcagtaccatcctcctgagtatgaagtggcctaaaagcttgtttctaaagaaaagaatacagcaaaagtgacaagatgccactttaagattacactctatatgacttccatcttgctagcagaatctgtcattttctagctttgattaaacaatttggcacataggggaggtgcatgtgacaaaaaactaaaagtgggctttgacaaacagacaggtagaaactgaggacctcaactaaactacctcatttctcattctggaaatgaatcctcccaacaaccacataagtgagcttagaactgcatctttccccatttcagccttcagatcagattccaacccagctaacaccttgacgacaacccccatgagagactgtgaatcaaagtagccaggtaagccatgcccttattcctgagccacagaaagtgtgagatttttttttttaagtgttgtttcaagtcactaccttttggagtaatttcttaggtattaatagacaatgaatataagatgtaaacttaagaagaacttatgaggccaggagtggggcacacatctgtaattacagtacttccagaggagagtttgagcccaggagtttgagaccaacctgagcaacatagtgagactctgtctctattctctacaaagaacaaaaaattagctgggtgtggtagtggatgcctgtggtctcagctattcaggaggctaaggcaggcagatggtggttgaggctgcagtgagccataattgtgctactgcactccatcctggggaagagggcgagtccctgtctcaaataaagaaaaaaaaaaaaggaataaatgaaaacatgttcatgatataagtaaaaagctttaaaaaaaatgacttctgcatgggaaaaaatattttgaacaagctaaaagagaagtaagactctagaaaaatatttgcaacatataaaagaatcaatatccagtcaagataaacaattataaatcagtaagaccacaaaaaaattaaatgaacaaagactaaagacactttatgacagaataaataatccaaagaaacaacaaagagatgagaaggatctgaacctcactggtgaatgggaaaatgcaaaataaggcaaaataatactggatcatctagatcatggaaaatacacaatttgataacatagtaagtgttggcaagatttgcagcactgaatgtttttgtgcagtgttttccaacactaacaaccaattctccaattatctaaacataaactagatgtccaacaattcaattcaattctgacactatctttgtcagaatccacagatttaagggttcaatcctacaagactgcctcctcttgagttcctctgcccggccgccccactgtctgggaagtgagaagcgcctctgcctagccgcccaccatctgggaagtgaggagcacctctgcccggccgccccacaccaccgccgccatctgggaagtgaggagtgcctctgcctggcccccgcaacgtctgggaagtgaggagcgcctttgcgcggctgctgtgcgaccctccaagtgtgaagtgacagccttgtgtgtgatctttctgccctccccaagtttgcattttcgacattaaagtttacttttcaattaaaatttttaaattggagaatatataatttaaaaaaaaaaaaaaaagactgcctcctcttaagatgccagtcacaagtcctgggctaccagtatttctgactaactggctataaattagaggctcccacaaacccctcctcaggtttgataatttactagaacagctcatagaactcaggaaacactttacctatggtacctagttaataatagaggatataactgaggaacagccagactgaagaaatgcatagggcaagatatggaagagggtgtgccaagcttccattcctctctgcgtgtggcatcctcccagcaccctggtatgttcacaaacctgaagcttgttcaagagtacaaaaaattagccgggtgtggtggtgggtgcctgtagtcccagctactcaggaggctgaggcaggagaatggcatgaatccggaggcggagcttgcagtgagccaagatcatgccagtgcccgccagcctgggcatcagagtgagacgccatctcaaaaaaaaaaaaagaaaaaaaaaaaaagaaaaaaactcacagcctgggcgacagagcgagactctgtctcaaaacaataataataataaataaaatttttttttttttgagatggagtatcgctctgtcacccaggctggagtgcagtggcacgatctcagttcactgcaacctccacctcccgggttcaagggattctcctgcctcagcctcctgagtagctgggactataggcacgtgccaccacgcccagctaatttttgtatttttagtagagacgggctttcaccatgtaggccaggatggtctcgatctcttgacctcatgatccgctcgggattacaggcgcgagcccccatgcccagcctgttcaagagtttttatagaacttactctccagtccattcctcctttcagttccaatcctctaattgcttggtctttctggggaccagtctcatcctgacactatctagaggtctcatgagtagtcacctcatgagcagaaattcaggtgtatcacagggtttccttatgaataacaaaagacacacctatttctcaggaagaaattccaagggttttaagcatactgtgccatgaactgggaacaatgaccaaatatacttatccgtgtcactttctatataccagactgtgaaaaataaatatacatttggtctctgccctccaaatctttggaattgctgaagtgtcttttatatgctattgagatgactggtgcctggggctcttccatggcctcaggaagggagctggttgccaggggaaccaaccttgtgacagacagttggaactttcagtctcacctctccaaccaacccctgacctctgtggaagggagaggtgatggaaattgagcttaccaccaatagttaatgaattaataaattatgcctatgtaatgaacccaccaaaacaataaaaggatgaggttgagagcttccaggctgctgaacatagggtagtcctgggagggtagaatacccagaaagggcatggaagccctgaggcccttccccattacctgacctatgcatcttttccaactggccattcctgagttgtaccctttcataataagccagtaatctagtaagtaaactgtcttcctgcattttttgagccttctagcagatgaatagatctgagaagggggttgtggggacatccaattggtagccaagtccaaaagaacttgtgagtaacctggggacccagcacttttcaggggggcagtattgtgggactgagccctcaacctgtggagtctgtcctaagtctagacaattagtgtcagaattgagtaaattttagaatacctaataggtatggagaattgaattgatgtgtgggaaaaaccccacatatctggtgtcagatgtggggaaaagaaagagagatcagactgttactgtgtctatgtagaaagaagtagacgtaagagacttcattttgttctgtactaagagaaattcttctgccttgagatgctgttaatctgtaaccgtagccctaaccctgtgctcgcagaaatatgtgctgtgttgactcaaggtttaatggatttagggctatgcagaatgtcctttgttaaaaaagcacttgaaggcagtatgcttgttaaaagtcatcaccattctctaatctcaagtacccagggacacaacacactgcagaaggccacaggggcctctgcctaggaaagccaggtattgtccaaggtttcttcccaagtgatagcctgagatatggcctcgtgggaagggaaagacctgaccgtcccccagcatgacaccgggggatacccgtaaagggtctgtgctgaggaggattagaaaaagaggaaggcctttttgcagttgagataagaggaaggcatctgtctcctgccaactacttgggaggctgaggcaagagaatggcgtgaacctgggaggcagagcttgcagtgagccaagactgcgccactgcactccagcctgggcaacagagcaagactctgtctcaaaataaataaataaataaattagtaattttaaaaaagttggttggcaggcaccagcatgcaaagaatgccaatattccaaaaatggtctggagtatgtacattaaaatgacaaccatagttccttcttgagtggtgggtgattcatgtatcattgtaatggtcaaaagttgaactaccaacaaagcatggattctttcatattgagtctacttttttttccttctttttgagacagggtcttactttgtcacccaggttggagtgcggtggtgcaaacatggctcactgtagcctcgtcctcctgagctctagcaattcttctcccaccttagcctcccgagtagctgggattacaggtgtgcaccaccacacccagctaatttttgtattttttgtagagacggggtttcaccatgttgcccaggctggtcttgaactcctgagctcaagcgatccagaatctacttcttaaggcagaatgaacccccacctctactcccaaaagcaatgtaagttaatttctccctagaacacaattatcccagtatatacttccttaagttcaactgacttcttcaggccaccataaatctatcaaaaaatcaaagggaaaatatcacctgggtcttgatcattttcttctgtgctcagaaaatagtggataacatggactatacgtctttgtctcttctgcatttgccatgaagtttttgaagttttcctagtcagaaatattagtgtccacttaaagttgtccccagaaattatgatatccaaggccagcaacctccttcttcttccttcattgcttcacttgagttattttgcttctgggagccaggacctgaggactgataaacaaaatggctttcagtgtacattaaccctgggtccagacattgtcactgctgctctgcacttaccttaaataaaagaccctaatatttctaacagttcctttatttgctgcctcagaggttttcatggttctaaatgtgtgaaatctatgcctttcttttgtgaagtagaagtggcatgactattatagagaaggtgggaaagcagaaccagcacagcacaatgcctcagaggcaggtgtctggggaaaagaaagagagatcagactgttactgtgtctatgcagaaagaagtagacataagaggctccattttgttctgtactaagagaaattcttctgccttgagatgctgttaatctgtaaccctagctccaaccctatgctagcagagacatgtgctgtgttgactcaaggtttaatggatttagggctgtgcaggatgtgctttgttaaaaacgtgcttgaaggcagtatgcttggtaaaagtcatcaccattctctaatctcaactacccagagacacaatacactgcggaaggccgcggggacctctgcctaggaaaaccaggtattgtccaaggtttctccccatatgatagcctgagatatggcctcgtgggaagggaaagacctgaccgtcccctaccccgacacctgtaaagggtctctgctgaggaggatcagtaaaagaggaaggcctctttgcggttgagataagagaaaggcatctgtctcctcctcgtccctgggaatggaatgtctccgtgtaaaaccccattgtctgttctatttactgagataggagaaaaccgccttagggctggaggtgagacatgctggtggcaatactgctctttattgtaccgaaatgtttgtgtgcgtgcacatcaaggcacagcacgtttccttaaacttatttatgacacagagacctttgttcacatgttttcctgctgaccctctccccactattaccttattgtcctgccacatccccctctccgaggtggtagagatagtgatcaataaatactgagggaactcagagaccagtgccagcgtgggtcctccgtatgctgagtgctggtctcctgggcccacttttctttctctatactttgtctcttatttcttttctcagtctctcatcccacctgacaagaaacacccacaggttgtggaggggtggcccccttcaaggtgaattctcagacagatcaattttaggaaagagaacacatggaaggctccaagaatgtctttaaaaaccacgtgtgcccatgtactggttcgaaagtctctgtaagctctttgggtatacatacctcgtgtcaagaccaatgtactaagcaaatcacaagaactgtctcatttcacattatgcgctaaaggagtaactttacccaagagagctttgtcctttgcccacagttcctatgaggcaaactctaagcctttggaatacgctgcttgataaaactgtctttggttatcagggcaatttaagccatgccaaattgtctatcctaataatgtgatttactgtgggagaccttggaccacgtggtattagtttgatatctggaggagctggagattgaagtcagcctcataggcagtcaattgtgtgtgtgtgtgttaactgatatccaataaaactctggacaccaaggcctaggtgagtggcaacaatggttacaatggctggcaataataatataagggtgtatatataagaatatgataatttaaaaacgtatgaagcaaaacagaatgagagaggattagacaattcaacaataataattgaagactacattaccctacttgcaataataaagaaaacaaatagaaactcagcaaggataccgaaaacttgaacaacattatcaaccaactagacttaacgaacatttaacactgcactcaacagcagtaaaataaacatttttttcaagagcacatgttatattcttcaggaaagataatatcccatgtgatagcctgagatagggcctcatgggaagggaaagacctgaccgtcccccagcccaacacccgtaaagggtgactcacaagggccccagacccagacagagtcggactcgtcgctgatttcctcagactcttcatccctacagccaaaggacccgtcattaacgccccgcttcctcagcgactgcgttcaaatacagccccaatcaggacgctccacgcaccatcggtacacagacccacaggccgcgagtccatgcccagaactcgactcacccgagcccgaacctctccagacaccactggcagcgacaaaacgccgcatccacgtccgaaaacgcttcctattcagacgcgctcctgcgcggactccgggaagctgagcggtaaagaccgtgaagcgaggcgaggaccacggagcctgcccgggatcgcgagttcagactgcgggcgccgctctatgaggtcacagggctgcgcccatcgcagcgtttctgacaggagcggccataatggctgtgggaatcactcttagtcacctcagtgcctttctctcttcgttgcaagggacactcaagagtcgggtgcccagccaaggccaacacggcgcagtggcattctattcagcctgctgtggaaaaaagatggcggcgccctttgtgcccattatagctgagagtggagccttagctggagcaccatgggcacggccatcttagaggaaggcagcagccgtacggcagagaagatgctcatatccaggacaatttggaaaaataaacaaggtttgaagaagtcacggtgctggccaggaagcggtcacagagttgccaaaaccagtggtcactgaaagtgttagatttggggatagggcgggggttctgggctgggtaaggcttttgtgggttagattagactctgactgaatggacgaagccgagaacaggagtgatgctccattaaatgctaatacccacatggggcttgctattaaaaccactgccagtggggaaggggatgaggaggtgaaggtgcaactgtgttaatatctacatgtttccttccagaagtaaaggaagatgacagtggggcacttaagaatatgaaattattagaatgcgatcatcctactttgcaatgtttccagattttttaaaaagtcacacttaaaaaatattagttctatttttgcagatgttggcgttgtaactgtagaagatttaagtaaatattgtatttttggaaggcaacctagagccaatttaattttttcgttttctttgacacagcaattctaaaagctatctaggcaaatctgtcttaatattaaccacaacttttgtaatttacaaaaaaagggaattacaatgagagatgaatactttggtaaattatggaacatctgctgaactgtaagagtatatatcaatttaaaagaatatgctacaattgttttataaaaaagaaaactttgtcagaggacaaaaaaatgatctgcaggatagtatatattttatggtcttgttattggaagaaatcataaacatcttttggaaaattgtgattggttaaacaagacatttagtttgaattaatattgtttgtgttcataggtagagaatgccatgtttttacttgaaaaatattcccaatttatacttaattttactatctttgtaccataatcatgaatatattataaaacatgttgatcttagaaaataggtatgatgatgtataataagttcatggcatgataaatgcaaaataggctgttttctttcagaaaataaatatgctcatgcatttgaaaaattctggagaatatactaacaatatttgactgttccgtacaattatggtgacttaaaatttcttcattttacttacgttttgtaatttctagagaataagaatttcatgttcgtatttcttgagtgttataacatattccatccaggattaaatttcagccccgttcatctggaatgttaatctctggtaggtaagtttagcacctggtccacaggactatgagcagcccatgatgggaccttcactgatcatttccaggagtgggctgataaaactttgccgtggcaggctgtgctgattcacgggacaaggaaggtgattcaagggcctggttggtggagcacttttgtctgattcattgctggagacaatctgccctgaatccatcctgttacagtgtgggaatggtgatgggagcaccaatccacaatttagggcagagatgttcaaatttaagaaggctctttttataaatgcagagtccgaaccccatccccagaaattctagcttggaatgtctggggagtgactcaagaatttgccttcttttacaagcttctcagagaatgctgaggcaggaaccccaaagaaaacacttagaaagttctatagtgttctggacttaaaaatatgatggctgtgtccccacagtatatttaggctttggttcaaattatatctgcacagaaaagcctatcctgaaaactcttcctaaaataactcaggttacaatctatgaacttaccaggctttatatttcttcctagcacttaactgaattcgattttgtatttatcttactcagtctccttcaccagactgtatgtcatatcaaagccagcactttgcctgttttgttcattgatgtgtctccattgcctacaacatgcctgccatggtgtagaagctcaaaaaatattttcaaagaagtaaattactcaatatggagtcagggattgaattctgccacaatactatatggcaaatgtctattacttttataaagagaactcaccatttataaactggattaaatctcattagatcaagggaaataactctggatagagaaaacaggaaccctgtttctagggaaactaataattttttgccaccaggcctgctcaaagagaaatgattaaggaagttcgcacaaaaaggaaataactaaaggaaatattacatcaggaatgaagaaaaaggaacagaaagggtaaatatattataaaatataatattcttttgagttttaaacattgggtttgctggttggaagcaaaagttacaattttacttgatatggttctcagtggatgtagagatgcttaatatcattttgtgttaggggtgtgtaagttgaggccatgatcatataccaccacacacctaataggaaagctaaagcacactggcaatgccaagagctagaaagggcatggaatgcttacacattggtggtgggaatgtaaactagtacagccactctgggaaagagtttggccatttcttataaagttaaacacatttaccatattcgccagcagtcatgcccccagtgtctatcccaaatatataaaaacttaacgttcgcacaatatcgggtacacaaatagtcacagcatctttatttataacagcaaaacactggaaacaacccaaatgtccatcaacagtgaatggatacacaaaccctggtgcatccatttaaaagaatactaactcagtaacaaaaattaaaactatttagacacctaacaacttggatagatcttaagggtaatttgctgagtgaacaaagccctatctcaaagcttgcgtaccttacgattccattttaatagcattcttgaaataacaaaattagggtaatgggatcagtggctaccatgggtcatattgggaggacagtgtgagtataaagaggtagcaagaggaggccaggcgtggtggctcatgcctgtaatcccagcactttgggaggctgaggcgggtggaccgcccggggtcgagagttcaaggccagcctggccaacacagtgaaaccccgtctctactaaaaatacaaaaattagtcgagcgtggtcgtgggtgcctgtaatcccagctacttaggaggctgaggcaggaaaatctcttgaacctgggaggcggggttgcagtgagccaagatcgtgctattacactccaacctgggcaacaagagcagaactccgtggtttttattattatggttatgtaagataacattgatgatgctaagcaaagaatactcaggaaacttttgtatattttgtaatctcttgtgaatctagaattatttcaaaacaaattttagaaaaataacatttaaggcatttttgtaaactacataatggtacctagtaacttggataaacacatccaaatatactgaattacatttatcagtaaattgaaaaaaataaatttggggcctataatatgtaagaactaataaataacaccagattggcacagaaaacacctgtgttatatataggattaaaatttaatcagtgataagaacagcccgctttacaattatggaatcattgataatatgatgcaaggtatgctgtcacagaatagatatcaagtgtatcatgagtttagatttgtgacagtcctcaaatatggttttttttttttttttttgaggcagagtttcgctcttgttgcccaggctggaatgcaatggcgcaatcttggctcactgaaacctctgcctcccaggttcaagtgattctccagcttagcctccagagtagctgggattacaagcgtgagccaccatgctcggctaattttgtatttttagtagagaggggggcttcaccatgttggtcaggctggtctcgaactcccgacctcaagtgatccacccaccttggcctcccaaagtgctgggattacaggtgcaagccaccatgcccggcattatgtatcattttcatgagacttttttacttcatgaatttcctgatcctttttaaagttactcttcatataagttttatttctgtatgaagtaatgatgatgaggcagcatgtatcactgaaatcctcgtgtattcactgccatctgaaacttgttctccagtatgaaatatatctgccaactgttaaggttttatttctgggcaaaggctttcccatgataatgctgctagtatgtgtaagttcattgatgatctattatgatcactgaagagatagggtctttcttcccatagaaggctttcctagcctactcctttgtaagatttatctcagtaaatacttttcaagacatagttacttagaaaattttcaagacttttctgcattggatgtatcaagtttatttcctacatgtttattgtgacataaaatatgaggtaattaatcaccgaaggcactagtgcattctctgcattcattaaaattcgctcctggaaattgcattgtcttccaagggtgaaaatctagcaacaggctgctctacactgcctatatgcatgtatgctaggagcacactgctgtttaatcagttcacattactaacgtggttttctctctgcatgaatttgtttgtatgtaatcagttcagattctctgcaaaaggactatgtaccttacacatttgtcatgtggacgttgtcatagttttaatgaaggttgacaaatgaaaggttacccccaatccacagactctctctcagatgagtaattttctatacattggtacatcaaagaattcagagcctgaattcatgttgaagcctttctgacattgatagcattcatcctagtgaataacactggattttgaaatatgatttttcatactcagtacacatgtagaaaatctatactgtgaaatctctgatgttgtacaaggcagattttcttcccaaaggcatgaacatgtccactgcattgtcagggtttgtttccattatgagttcgctgatgtacaatgagatttctctttgaggagaaggcttttctacattcactgcatacaaagggtttctctcctgtatgagttcgttgatgaacaattagacggctcttcatagtgaagcctttaccacattcattacatccataaggtttttctccagtatgaacttgcttatgtaaagcaagctctgtttccttggcaaagcctcttccacattcactacatatacaagatttctcttctgtatgaatttgctgatgtacaatgagatagcgtttcatggtgaagccttttccacattcactgcacataaagggtttctctccagtatgagttcgctggtgtacaacaagattgctcttaaaggcaaaaccttttccacattcattgcatatgtacggtttctctccagtatgagttcgctgatgtaacatcagtccgctattcacaatgaaacctttcccacattcactgcacctgtaaggtttctctccagtatgagttcgctgatgtacaatcagccgactcttcaaggggaagcctttcccacattcactgcatgtgtagggcttctctcctgtatgagttcgctgatgtatgatgagcatgcttttcacagtaaaaccttttccacattcactacatagatatgacttctctactgtatgatttctctgatgtacaataagattactcttcctgggaaagccttttccacattcactgcatatgtagggtttctctcctgtatgagttcgttgatgttcgatcatacggctcttcatggtgaagcctttcccacattcattgcatatatatggtttctctcctgtatgatttcgttgatgtatgatgacatagtgttttgtggtgaagcctttcccacattcactacagatgtagggcttctctcctgtatgagttcgctgatgtataataagcatgctcttcccagtgaagccttttccacattcactacatatataggatttctctccagtatgatttcgctgatgtacaatgagattacgcttgcctgggaagccttttccacattcattgcatatgtagggtttctctccagtatgagttcgctgatgttcaatcagacggctcttcatagtgaagacttttccacattcactgcatataaaagatttctctcttttatgaattctttgatgttcatttagcctggactttctggagaacacttttgcacacaaagtacatccataaggtttttctcctgtatgaactctctcatgatcagtgagctgagacttcttgacaaacgctttcccacattcactgcatacgtggtttttttctatttcatgagttctctgatgcttactgacttgggatttagtgctattggcttttgtacttacagagaatttagctgcagaataaagttcttcatagttaccatgaagaaatgatttcccatctccactaaatttagtagagttgttaatttcacagcttttgttctggttgactaaacttaaatttgatttcaaagtttttatatataactcaaatgtatcatgattttccctgaaaagacaaaggcttttggtttgagaggcagtatttccaaatgcattatgttcatggtattgttccacactcttcagcatcctttgattttccaagtgatcctgcagatgatcatcaacttcgttgttttctaggaaagaagagaacaatgaatccttttataatcttgttggggataaaactgtcttcttagaaaaaaaaatccttggtgttttattttgtttattattattattttttgagacagagtctcgctctgttacccaggctggagtgcagtggtatgatctcagctcactgcaacctccgcctcctgggttcaaccaattctcctgcctcagcctcccaagtagctgggattacaggcatgtgccatcatgcctagctaatttttgtatttttagtagagacagggtttcaatatgttggccaggctggtcttgaactcctgacctccagtgatacccctacgtcggcctctcaaaatgctgggattacaggcatgagctaccacacctggccaggtgtttttaaatatcgctatttaatgacaatactacaataatagtataaaagcaacttcatgtatacactttggtaaaaacataataatataaacaaaccaaaaagtaaaagcagtctgtgtgcaaataaggtgaggcagttgacaatctatatcgatttgacagctttctaaacaggaccttgcaaaacatgcggacacagtaaaatacaagcaagtcattattacaagcaaacaacagggcttggaggaacaccattccacaaaattttgggagacaccagaccacaaaggtggaaaaggcaactgattcacaattctgagggttgtatttattcactccactagttatttgtcaaatgactcctatggacaaggcactctgctggcatttgggatacacaaaatatgccttcttttcactcatgctgaattctaattaggaaaaacaatacgaaggaacaaaaaaagaagggagttggtgatgttaagtgtggtttgatggagcagtgtagatgatgagagttggagaaaagcaggatatttttgtataaagaaaagacaaggttaaatgatgaattcaatggggagagtgaggaaagtgagggctcaaagattactaactatatggcttgagccactgggtagatgacagcatctgataatgagatggcaaatattactgcagtccagcacatgtaaagtatatactgtgaaacacactttgaaatggttatcaaatatgtaacacagacatcaagaatctggttggaggtataaatggagaaggcagcatggaaataatcagtacatacatattatttgagaaaaaaggactgaatgacttttttttttttgagacagggtctcactgtcacccaggctggcatgcagtggcacaatcttgcatcactgcaacctccacctcccaggctcaagcaattctcccacctcagcctcctgagtagccgggactacaggcacatgcaaccatgcctgattgatttttgtattgtttgtagagatggagtcttgccatattgcccaagctggtcttgaactcttgggctcaagtgatctgcccacctctgcttcccaaagtgctgggactataggtgtgagccaaggcactgagccaggataccatgttgagaagacatgtagaatgaaagatgaaggtacagaaccaaggttgtagacattccaacatgtggttttgggattatttaagccctgttagaggaaccaaactgtgaatacaaagatcagggtaatatgcttactgagatatatagaataaatacattcacgtacatgttgcctggcaagtaagaattggaaatctccatctgttgaaattaagtcaactgagatagactcttgtgtggtaattgttactaaatttgcccctcttcaatctgtagactaccatctaactttccaaaaacatccatcacgtttaatgaacaactcctatagtcaacactccaccctttggtttagctgtgttgcgttatcatatgtttcattaattatgaaacaggaaaacaatgatagggaattttgcaactggccagtgtaccatgtagttgccttcagaagaaaatgtgctgctgcatgggatatgaaaactgtcattttcttcaatcacattctgcatgcagtagaaaagtcgtatcaaggccaggcacggtggctcacacctgtaatcccagcactttaggaggtcaaggtgggcagatcacttgagctctggagttccagaccagcctgggcaacatggtgaaacacaaaatacaaaaattagccaggcatgcatggtgatatgcgcctgtagtttcagctacttgggatgttgaggtgggaggatcgcttgagcccaggaggttgaggctgcagtgagccaaaatcgtgccactgcactccagcctgagcaacaaagtgagactctaccttaaaaaaaaaaaaaaaaaaaggtcatatccaatttttcccatttcaatgtccctgatacactgtttcctcatctgccaccaataacatctacttcagtaagctacatttatgtctcagcatcagttaagttgtactaaaggataaacttcttctagacaaaggttgtggcatcttcaccttcagtttttcttaagatatttagctgtttcttattattgctacactgctgtcatccaagtgaaaggtcaagactagcaacatattttatgaaaagacaaaaatataaaattaaccaaccctcaaccatgctacctcaattactcatatatacaatcaaaagtcatcttgataaaaaaaagtttacattaccatgaatattaccatgtttctgctccacgatttctccaacaagcagcttctatcactgacctgtatttggccaacttgaagccaatcttttgatagtcaggcccatggccttgcacaattcctatttcatgccttcattcttttttttgagatggagttgtgctcttgttgcccaggctggagtgcaatggcacaatcttggctcaccacaacctctgcctcctgggttcaagcaattctcctgcctcagccttcctgagtagctgggattacaggcatgtgccaccatgcccggctaattttgtatttttagtagagaaggggattctccatgttggtgaggctggtctcaaactcccgacctcaggtgttccccccacctaggcctcccaaagtgctgggattacaggcatgagccaccgcacctgacccatgccttcattcttaattcatgtcaccatcttcctaattcaaaatctagatatgccttgtgcacatcatactcttgctgcaattctgactatcctgccatatgctctatgttctctgtattccttaattaacccctttattgttaatttttatggtaatcttctgtgtagtgaggatctagctctaacctcatccaaacagagatctagcatttgttcttagctattaggaaatgatctctaggcccctggaatgtcctggcccataggagtgtctttgtttgcctggtggctttagccactggacagtttaacaatatgatttgtgataggggctttggcccatgccatatcacttccagcctttggaaaaactggacactctaggtattagcctgacttccaggagaggctgaagactaaaagtcagccatgtgggctgtatgtgactgaaacctaatcaaaactctggccaccaaaggctcaagtgaacttccctagttgtcaatactctgtactgtcacacactgtgtggctgggaagagatgtaacatccacagtgagaggaggaccagagaagtactgtacttggaccccctcctggactacaaatgacctggcaattctactcctaggtgaaggctcaagaaaaatgaaaacatacgttcctaaaaaagttgtacatgaacgttcatagcagcatgattcataaaagccaaaaagtagaaataacccaaatgtcaatgcaatagatgaattgataaataaaatgtggtatatccatacaatggaatattattcaacaataaaaagaaattaagcactgatacatgctaaagaatggaagaatttcaaaaacattatgctaaatgaaagaagccggacacaaaagaccatatatttcatgattctatttatataaaatgtccagaacaggcaaatctatagggataaaaagtagaggccaggcacggtggctcacacctgtaatcccagcactttgggaggccgaggcaggtgggtcacgaggtcaggagtacgagaccaaactggccaacatggtgaaaccctgtctctacaaaaacacaaattagctgggcatgatggtgcgcgcctgtaatcccagctacttgggagcctgaggcaggagaatcgcttgaacccgggaggtggaggttgcagtgagccgagatcacaccattgcactccagcctgggtgacagagtgagactccatctcaaaaaaaaaaaaaaaaaagaaaagaaaagaaaaagaaagtagattagtgattgcctagggctgggggcttggaaacaatttttttttttaagtgatactttgaaaatcttccaaaattgactatggtgatggttacataactgttcatacactacaaagcactgaaaaataaactttaaattggaaaattgtatggtatgtaaattatctaagctgttgaaaaaacaaatctataatgggaaaaacacattagggaaatgaatacaatgctaccgtctaagatgaactaaaggaaaagtagaaatcaaatgtacaaaggaagtactctgagacagacataagttatgacctggtttggtctagaactgatgtaggacataaaacagtcctttctaggtaaacagtaaacaaaaatagtagagacttttaagaagagaactccataggtagaggacattcaatacaacaccagcacagacaggacagatgtatggtactaaaggagaatgcaaccttaaaataagatgggaagggtttcttgtggagggaaaacgattcccattcctaatgtaggcactgcttctgtgtcctcagacacccacagagccttctttcactgactataatattacttacgcatcttgctgcttctcacatacctggacagattcgactgtgcctttcatcttccattgtccatggttcttctcctcgttccaacttggagagtgcatctggtttgctgacttgataacctgtttacgggaaataatagaagacagacacactggattgggctggggtatgtaatgtgagagaatgttacatttaagtaactagacagttttcacatctgaaagtagaggcttctctctcaggaaagggcagattacagtcagaccttaatatctgaaaatttcacatccagggattcaaccaaccatggattgaaaatattttttaaaaaacaataaaaaatacaataataaaaaaaaatacaaagtgcagtggctcttgcctataatccgagcactatgggaggctgacatgaaaccaacatttgaagccaggagtgggagaccagcctgggcaacatagactccatctctacaaaaaaaaaaaaaaattagccaagcatggtggtttgcacctgtaggcatagttcctcaggaggctgaggcaggaggaacacttgaacccagttcaaggctgcagcgagccatgaaggcaccactacattccagcctgagtgaaagaccgagacactgtctctaaagaaaaaataaataaataaattaattaaaacatatagtataacaactatgtacatagcatttacattgtattaagtatcaggcataatttggagatgatttaaagtattcaggaggaggtgtgtgtaggttatatgcaaatacaatgccattttatatgagacttgagcatctgtggatttcatatccatggaaagttgtgaaaccaatccctcttggacactgaggggtgacggtatatccttttatcagaagccagaggatgtgccaaaaatctaatattcagagcactgcagtaacttccaagggtaagcaactgagaaagcaaaggccacagactgggcaccctccaggtgacacagagcagctgtcctcacccattgatagcaggttgctgtagatctccaacatcacatcccggtacaaatccttctgaaaagggcccaggagctgccactcctcccaggtgaactccacagtaacatcctccagtgtcagcaattcctgtaagaaaacagagccttgcttaataggaagtgtttctcttttactgacatgaaaagaaagtgaagggaagttgtcccgctcacattaaacatatagactgcatccatctataagtctattgtattttttaatattgccagagaatctccaagtattctataattgcacagtgccccatttgctcaacaaaaattaaggttttatatcaaatcctctcagtaaaagcgggttttatgtataaattttaattttggtatctattgaccagtcaagaaagtatatgctactgacatctagatatctgatataaattgtttcattcactgttaagccttcccagctaatactagcataagacatagagagacttcagatgctagaaccacaggatactacattcatgtttaattgttaaatggattaaaaaatagaaatgtacagaaaacatgagaaactattaaagagtaaccaaattgggaaaacttattcttggaaacatacattaaatatatatgtatgcacacatacatataaatatatgtttatgtatatatacgtatacagtcacaggtatatgtgtctattaacagaaaggttatattaaatacactgaagagataattagtgagttggaattcacagtaaaaaaaataacagggccaggtgtggtggctcacacctgtaatcccagcactttgggaggctgaggcaggcggatagcttgagctcaggagttcaagaccagcctgggaaacatggtgaaatcctatctctaccaaaaagacaaaaattaaccaggtgcggtggcacacacctgtgatcccagctacttgggagggtgaggtgggaggattgctggagcccaggaagttgaggctgcagtgagctgtgatcatgccactgtactccagcctgggtgacagagtgagaccctatctcaaaaaattaaaataactgaaaaatgaagcagagacacaaagtgacagaaagtatgaaggagactttactaaatatggaagacagagtgaggcctaacatatgcctatacatagtttttgaaatattatattcaaataagagaagcaatttccaaatatctgactgagaaattttcagaactgattaaatatcctataactcaaatttaataaatcaacaaagccaagcagaaaatctgcatctagacacatcagactgaaactattgaacatcagatgcacatataacattatgcaaacaactgttaatagaaggaaaagatgcattaccatcaaaagaaaaataaaatgtcctaacaactgacttccacagaaacaaaagaagcaagaaaagtgcagaataatgtcttcaatgtcctgattctgtggcaattggcaaattgtatggtatggcctagccctgaatgccactggaaaataaattgagaccctcttgtcaactaaactgccactctcctgtctcaacatgacttataatcacatggtagtaggaacttgaggcaggaaagagctaggtgcaaatttgtggggaaaagcaagagagatcagattgttactgtgtctgtacagaaagaagtagacataggagactccattttgttctgtactaagaaaaattcttctgccttgagattctgttaatctatgaccttacccccaaccccgtgctctcggaaacatgtgctgtgtcaaactcagggttaaatggattaagggcggtgcaagatgtgctttgttaaacagatgcttaaaggcagcatgctccttaagagtcatcaccactccctaatctcaagtacccagggacacaaacactgcggaaggccgcagggacctctgcctaggaaagccaggtattgtccaaggtttctccccatgtgatagtctgaaatatggcctcgtgggaagggaaagacctgaccgtcccccagcccgacacccgtaaagggtctgtgctgaggaggattagtataagaggaaggcatgcctcttgcagttgagacaagaggaaggcatctgtctcctgcccgtccctgggcaatggaatgtctcggtataaaacccgattgtatgctccatctactgagataggggaaaaccgccttagggctggaggtgggacattcgggcagcaatactgctttgtaaagcactgagatgtttatgtgtatgcgtatctaaaagcacagcacttaatcctttaccttgtctatgatgcaaagacctttgttcacgtgtttgtctgctgaccctctccccactattgtcttgtgaccctgccacatccccctctcggagaaacacccatgaatgatcaataaatactaagggaactcagaggctggcgggatcctccatatgctgaacgctggttccccgggtccccttatttctttctctatactttgtctctgtgtctttttcttttccaagtctctcgttccaccttacgagaaacacccacaagtgtggaggggcaacccaccccttcacaaattgatgggataatctatccccatataatcacagagattaatacacagagaaaagaacagacttgctgaagtctgcaaattcttaatgctgctgatctcatcacattcgggaattatttcacacgagaaataaatctgtttgaaaaaaaatgtaggtttctacctaatttcatactcaaaaataagtttttcctgtttaaagtccttaccagaaagcaaaagaacctgtggaagcagaagcaaatacgaaatatattcatgttaaaagccataaaggaaaaaaaagggacaaattttatgagaaaaaaaatttaatttctacattgaaaaacagatcataaacaaagctgaaagaaaaatgacaggctaaaaaaaactttgcaataaacaaaagatcaatatatagtagatataagcaactcattagccagtaagaaaaaagtttttttaatgtaaaaatcataaagtcaggcatttcacaagagaaaaaaatccagttggccaagaaatacacaagaaggctttcaacctcacctgtgatgaggaaaatgcaaaataagacaaaagaatattggatcattgaaaattgtataatttgataatgtcatatttttaagtattggcaaagatttaaggcacaaaggactccatgtatcagtttctatgtggcaggcactcatctaaatactttacatagtttaacaatgttttcatgtatgactttagacaaatggaattttatacagtcaatattcttcaattaattgcagtgattattcctttatattctaaaactacaccacctaaggtaggggtgtccaatcttttggcttccctgggccacactggaagaagaaatgcgttgggccatgcataaaatacactaacactaacgatagctggaaaaaaatgcaaaaaattctcattataagaaaatttacaaatttgtgttgggccacattcaaagccatcctgagctgcatgcagcccacaggccacaggttgtacaagcttgatctaaggtgaccaacaggtggaatgtgattccactgaagcaaaagaagtcataataaatgtgtttatatatgcagacacatacataaaacacatggatttataaatacacatatatacagagatgcacacatttcagtgacagcaagtatgtgctaccaaacatttgttgaagcagtataagaggattaggaagaaagttatgaagagggaatctacttttactttttttaccttttttttttttttttttttcgagacggagtttcgctcttgttgcccaggctggagtgcaatggcatgatctcggctcaccacaacctccacctcccggattcaagcgattctcctgtctcagtctcctgagtagctgggattacaggcatgcgccaccacacccagttaattttgtgtttttagtagagatacggtttctccatgttggtcaggctggtcttgaactcccgacctcaggtgacccgcctggttggcctccaaaagtgctgggattacaggcgtgagccactgtgcccggcccggaaatttacttttttaaccagtgtgtacttcatcatcagaatttatttccctgtgaggccaggtgcagtggctcacgcctgtaatcccagcactttgggaggccgaggcgggtggatcacctgaggtcaggagttcgagaccagcctggccaagatggcaaaaccccatctctactaaaaatacaaaaactagccaggcatgcaagtgcacacctgtaatcccagctactcaggaagctgaggcagaagaatcccttgaacccaggacgtggaggttgcagtaagccaagatcacgcactgcactccggcttgggcaacagagtgagattccatctcaaaaaacaaaaaccaaaaaaaaaaaaaaaaaaagaattttttccctttggattccatgagtaatttatgtaattacaaaaaataaaagcaatataagtatgcaagaattggaggtgaaaatgcagaaggatattgtatattctgagatgaggtgaagttatcaaacatggcacccaacgactcaagaccttatcagacaactccctaatgccaaatctgcagttaatgccagttcagccacatgttcaggaaaatggaagctatgcacaccttccattttcctaggtcacttagattttattcctaaataagctcacacagacacgcaagacttgagtgtgtggccttgctttcgtcccctaaaaaaactgtttccactgagtttgcctggtctatttccataggagtctctgaggaaccgtgtaataaacagcagtaagaaatcttctgcctttattagaaagctagttcaaaacactgttcaccatatcacctctgggaagaatagcaaatttttcttgagatctaagtgccatgaaataataatctcctgaggaacctgtctgctttctccccacagtcactgtataacttagtgtgactttcttgtactggctgtcagagacatcagatgcaaactgagagctaaggtaatggaaaggatcttctagtcaggcattattttccaacatcagtcattttgtaggaatcacataaacactatattcctgatcttactttgccatgatgttggagttagatttaaagtttatttctctctagattctgaaatgatttcttacgggtctctacaaatccactatggaataaaggagagaataaaatagagaaaaagtcacctgggcattgatcattttcttctgttgtgggaaatggccagcacctgggatactctgtctttgtctcctctggatctgccttaaatttctatttagaaacttcagtcaccagtgaagggtgtccacagaaatcatatctaggtcctggaatcttcctctttcttcatttacttcttgtctcttcccagggtagccaggacctgtggactgaagagcaaaacaactttcaggggtacattcaccttaacacgtggccctgaatatttgtctctttatttggttctctcaaaccaaggaaacacaagaccctcaatgtaggccaaatgcctttcttcggtgaagtgtggaagtaacatgaagatgaaaggggaggtcacaaaggagaatccacatagcatcatgcctaagcagtaggtaattctcatatcagttttttaaatcaggccatatggatggtgagaaactacattttttcctttatacaatgttactctcacacctctttaaaagtctttatatatatttaaaagtgtttatatacggccaggcatgatggcttacacctgtaatcccagcactttgggaggccgagatgggcagatcacctgaggtcaggagttcgagaccagccttgtcaacatggtgaaacactgtctctactaaaaatagaaaaaattagccaggcatggtggcaggcacctgtaatcccagctactcggagactgaggcaggagaatggcttgaacgcaggaggcgaagtttgcagtgagcccagccattgcactcaagcctgggcgacaaaagcaagactccatctcaaaaaaaaaaaaaaaatgtttatatacacacttcaatatgaagaacaagaaacacatagaaaaaaagagggagacagagaaaaggaatacgagttataaatacaaatttagaaaacaattcaaaaatataaatactgggaaaatagccgcctttatatactaacatacaaaacctgaaacacccataaaaatatgcagtacatttgcaagaggaaggataaaaataggctcttgttaatttgtgcgcagtaatttaaaaacataatgttaaatagaaagcctattcatccgccccccttcacccccaaaaaactttcattttctgcaggttcaagagcatgggttgttgtggaaagccagaggattagaaaactcattgtggaggaggtactcggacctgaaacttttaggaaatgttaacgttcatcaagtctgttccagccaaagtttgagctcaacacacacacacacacacacacacacacacacacacacacacacacacacacacaaaaccagccagggctcttgtgaaaagacttcggctttcacttgtctctagacaaaagaccaccaccccgccagataaaataggaaaacctggaatagacacacacgtacactggattcccttaatgattcatcaatcactaagcctcagattaatccagaatgtgaaacagaagtcacattcgttgacaaaagccaccccatcgattctcaatcactgagccccactggggagtgacccgcgaggaccacaatccctgacctcagtactcttggtcgttgatctattcaggcctttaatcactgaccaccagagcctccatgagggaccccaaagatatcctatcacagacacccaccagggactcctaccagctcccctccaaaaggaaacacccgcccccgcctcccccaacccccgcgctacctccaccatatagcgccaccaacaacgcagacgccctcagaaagctccctcccaccacgtttccacgccctgacccacacactgacctgactctccttggaatcgccgcgacctcttaaaagctgaacttacttccctaaacttcttccacttctgggcccctcgcccaactccctccccctctaaacctccagagacggtcagccgcgtttccatggagagcggaatgcggccttccggcttttcctcaggaggagacgcgtccgcgccggcgtcgcctcgccgctctgggggcggccatctttgagtacgtgacgtacagaaggcacagcggccgggagacgcggtggacggaggcctcttaaactgtccgatttccagacacctcagccctggcagaaaatggagagcttatcagaggcttgagttcacacaggcagacacggcgtgggggtaaagtcctctgaacagacacggaacagaaataagttagtcttctcctcgcaggggacagtgaacggcgcaaacttctcaaaggccagaacccattattaccacaaaggcgcggcatcccttcttagcggttatgatggctgtgacgtctcagctcaatggaaaattaaagtcacctctgggcacctcagtcactattgtaaatgcgaagcgttttagaagccgtataaaaactgaagcaagagagactagaacaaaaaataagcgagcggtgcgttgcaggtaacggagccagagcccttaggggagagcatcatgggggcggccatcttaggggacgttcggtgtccgtacggcagaacatattctctctgagaagcttgcggtggaactggcccatggaaatgtctttagaagagaagaaccacctggctctgttcttgactctggaaaagaatccttttctagaattatttaggttgttgccagattaatttcctttagagagtttccttgcccccacgacttcctatctttaaagccaacaatagtatgtgaaatccctttcatatttgaaaccactgactattgctgctgcatctctccggtttctcctattcttaagtgcttgggcaatccagaataatctcccaatgctaaagtcagctgattaataaacttaattacaatgcagagtcctttttgccatgtaacataaccatgggaattactctggggttgtagatctggctatgatatgatgacactaatgaatattttgcaataaaaacatactattttaaaatatatatatacatatatctttatatatgtatatttctacagaattattacaagttatgtcttatgatggtttcttataagaagcaaggaggaaaaggtccttaacattttcaattgtgttttttttaataataaagcatgcattctaatttacaaaaaccacaataaaggtactttcatcatgtcagtcttgaggctgaacaacacttaacattctttttccttttacctgtctgccttctcccttcccctacactctctataccccaccctccaggctctctgttccatcatcttatgcgtatggcccctttcccctgtgccctcttattacttccatctatcacgcagacacacactgtcactcccctaaacactctagtgttaaacaattgctgctgattgttttttgacaagtgccctatgggtaggagtgttcacataaataaagtcaagccaaatagagaaatactatgagaatagacctattcagcaggctgcaaagcaggcttagtagtgaacattctgtggggatggaggcttttgggtgtttcagagccatttctgccattttcagagccatttctacctcctcaagtgcagatattctgctagggtgcagatattcactgttactgttgttaaaaggtggttgcttttcaaggctaccttgaagctgaggatatggggataggattagggcaagctaaataccacaagctcactgtggccggcattgtagacttaattggccattctagaagaggaactaactggcttctagccagggcctaaaaactagatctagatagccaaaaagattacattaaacttcctctagtgtcccatctatcagattccaatcctgaaggaccaagtcaatctctcttctatttcatctcctttctcccatcttataaaagatctttggaaaactctgtttatttcatatataacagagctgatatttgtatgttttgtggagatgatgtttcatcatgttgcccaggctggtcttgaacttttgggctcaagcaatcctcccacctcgaccttccaaagtgccaggattacaggcataagccaccatgcctgtcttaacatttaatcttttcaaattacttcactatgtattcttttttgttgttgttctttttttctgtttacttcactgtgtattctaagcacaaataagaaattcttatttcctaattattgtttatttccatatatataatatatttttttaataagtttttttttagactgcatctcactctgtcacccaggttggtgcgcagtggtgcaatctcagctcactgcaaactctgtctcccgggttcaagcaattcttctgcctcagcctcccaaatagctgggattacaggtgtaccaccacacccagctaatttttgtatttttagtacagacatggtttcaccatgttgttcatgctggtctcaaacttctgaactcatgtgatccacctgccttggcctccgaaagtgctgggattacaggaatgagctccaacacctggcccatttcctaatatttgtatacacttgctatatttttatttttaccacacataaaaatcaaggcaaatgcaagccatggatcttatacatacaaaggcatgtagaactataatcatatagtgaatattcatgcatactgaggcaggtttttagatgctcagagtctgaaattgcactgcatggtatttccataaaatgtcctggggcatactcggacagaatagctcaagtgcaaattataagcatatattccccaaattgtatcctgtttgaattcatcaaagttgaaatgaaggaaaaaataataagggcagctgtggggaaaagaaagagagatcagactgttaacttgtctatgtagaaagaagtagacaaaagagactccattttgttctatactaagagaaattcttctgccttgagatgctgttaatctgtaaccctagctccaacccagtgcttgcagagacatgtgttgtgttgacagaaggtttaatggttttagggctgcgcaggatgtgctttgtttaaaaagtgcttgaaggcagtatgcttggtaaaagtcatcaccattctccaatctcaagtacccagagacacaatacactgcacaagcccacagggacctctgcctaggaaagccaggtattgccccaggtttctccccatgtgatagcctgagatatggcctcatgggaagggaaagacctgactgtcccccagcccaacacccataaagggtctgtgctgaggaggatcagtaaaagaggaaagcctctttgcagttgagataagaggaaggcatctgtctcctgctcatccctgggaatagaatgtctcggtgtaaaacctgactgtatgttctgtttactgagataggagaaaaccaccttagggctgcaggtgagacatgctggcagcaatactgctctttattgcaccgaaatgtttgtgctcgtgcacatcaaggcacagcagctttccttaaacttatttatgacacagagacctttgttcacatgttctcctgctgaccctctccccactattaccctattgtcctgccacatccccctctccgagatggtagagataatgatcaataaatactgagggaactcagagaccagggccagctgcgcaggtcctccatatgcagagcgccagtccctggggcccccttttctttctctatactttgtctctgtctcttatttcttttcctggtctctcgtcccacctgacgagaaacacccacaggctgtggagggggtggcccccttcaggcagccagagagaaaggtcggcttacccacaaagggaagcccatgtgactaacagcagatctctcagcagaaaccctacaagccagaagagagtgggggccaatattcaacattcttaaagaaaagaactttcatcctagaatttcatatccagccaaactaagcttcctatatgaaggaaaaataaaattctttacagacaagcaaatgctgagagattttgtcaccaccaggcctgccttacaagagctcctgaaggaagcactaaacatggaaaggaacgaccggtaccagccaccacaaaaacatgccaaattataaagaccatagatgctaggaagaaaccacatcaactaacgagcaaaataaccagctaacatcataatgacaggatcaaattcacacataacaatattaaccttaaatgtaaatgggctaaatgctccaattaaaagacacagactggcaaattggatagagtcaggacccatcagtgtgctgtattcaggagacccatctcacgtgcagacacacacatatgctcaaaaaaaaaaaaagggatggaggaagatctaccaagcaaatggaaaacaaaaaaaagcaggggttgcaatcctagtctctgagaaaacagactttaaaccaacaaagatcaaaagagacaaagaaggccattacataatggtaaagggatcaattcaacaagaagagctaactatcctaaatatatatgcacccaatactggagcacccagattcataaagcaagtccttagagacctataaagagacttagactcccacacaataataatgggagactttaacttgccactgtaaacattagacagatcaacgagacagaaagataacaaggatatccaggaattgaactcagctctgcaccaagtggacctaatagacatctaccgaactctccacctcaaatcaacagaatatacatttttcctagcaccacattgcacttattccaaaattgaccacatagttggaagttaagcactcctcagcaaatgtaaaagaacagaacttataacaaactgtctctcagaccacagtgcaatcaaactagagctcaggattaagaaactcactcaaaaccgctcaactacatggaaactgaacaacctgctcctgaatgactactgggtacataacgaaatgaaggcagaaataaagatgttctttgaaaccaatgagaacaaagacacaacataccagaatctcttgacacagttaaagcagtgtatagagggaaatttatagcactaaatgcccacaagagaaagcagaaaagatctaaaattgacaccctaacatcacaattaaaagaactggagaagcaagagcaaacacattcaaaagctagcagaaggcaagaaataactaagatcagagcagaactgacggagatacagacataaaaaacacttcaaaaaatcaatgaatccaggagctggtttttgaaaagatcaacaaaattgatagactgctagcaaaactaataaagaagaaaagagagaagaatcaaatagacacaataaaaaatgataaaggggatatcaccaccgatctccagaaatacaaactaccatcagagaatactataaacacctctacgcaaataaactagaaaacctagaagaaatggataaattcctggacacatacaccctcccaagactaaaccaggaagaagttgaatccctgaatagaccaataacaggctctgaaattgaggcaataattaatagcctaccaaccaaaaaaagtccaggaccagacagatttacagctgaattctaccagaggtacaaagaagagctggtaccattccttctgaaactattccaataaatagaaaaagagggaatcctccctaactcattttatgaggccagcatcatcctgataccaaaggctggcagagacacaacataaaaatagaattttaaaccaatatccctgatgaacatcgatgcaaaaatcctcaataaaatactggcaaatcaaatccagcaatacatcaaaaagcttatccaccaagatcaagttggtgtcatccctgggatgcaaggctggttcaacatacacaaatcaataaacataatccatcacataaacagaacaaaaggcaaaaaccacatgattatctcaatagatgcaaaaaaggcattcgacaaaattcaacagcacttcatgctaaaaactctcaataaactaggtattgatgggatgtatctcaaaataataagagctacttatgacaaacccacagccaatatcatactgaatgggcaaaaactggaagcattccctttgaaaactggcacaagacagggatgccctctctcaccactcctattcaacatagtgttggaagttctggccaggacaatcaagcaggagaaagaaataaagggtattcaattaggaaaagaggaagtcaaattgtccctgtttgcagatgacaagattgtatatttagaaatcccatcgtctcagcccaaaatctccttaagctgataagcaacttcagcaatgtctcaggatacaaaatcaatgtgaaaaatcacaagcattcctatacaccaacaacagacaaacagccaaatcatgagtgaactctcattcataattgttacaaagagaataaaatacctaggaatccaacttataagggatgtgaaggacctcttcaaggagaactacaaaccactgctcaacgaaataaaagaggacacaaacaaatggaagaacattccatgctcatggataggaagaatcaagatcgtgaaaatggccatactgcccaaagtaatttatagattcaataccatccccatcaagctaccaatgactttcttcacagaattggaaaaaactactttaaagttcatatggaaccaaaaaagagcccatattgccaagacaatcctaagccaaaagaacaaagctggaggcatcacgctacctgacttcaaactatactacaaggctacagtaaccaaaagagcacgatactggtaccaaaacagagatatagaccaatggaacagaacagagcccccagaaatagtaccacacatgtacaaccatctgatctttgacaaacatgacaaaaacaagaaatggggaaaggatttcctatttaataaatggtgctgggaaaactggctagccatatatagaaagctgaaactggatcccttccttacaccttatacaaaaattaattcaagatggattaaagacttaaatgttagacctaaaaccataaaaaccctagaaaaaaacctaggcaataccattcaggccacaggcatgggcatggacttcatgactaaaacaccaaaagcaatggcaacaaaagccaaaattgacaaatgggatctaattaaactaaagagcttctgcacagtaaaagagactaccatcagagtgaacaggcaacctacagaatgggagaaaatttttacaacctacccatctgacaaagggctaatatctagaatctacaaagaacttaaacaaatttacaagaaaaaatcaaacaaccctatcaaaaagtgggtgaaggatatgaacagacccttctcaaaagaagacatttatgcagccaacagacacatgaaaaaatgctcatcatcactggccatcagagaaatgcaaatcaaaaccacaatgtgttacaggaaggcagggaccccaaacagagagaccagatggagctgcggcaaaggaacataaattgtgaagatttcactttaatatggacatttatcagttctcaaataatacttttataatttcttatgcctgtctttactgtaatatcttaatcctgttatcttcataagctgaggatgtacgtcacctcaggaccactgtgataattgtgttaacagtggttctgcttttgccctttgccctgtgatctttgttggacccatatcagtggttctacttttgccctttgcccttttccctcagaaagatgtaatctttgttagacccttatcagtggttctgctttttgctctttgaagcatgtgatctttgtacctactctctgttcttacaccccctccccttttgaaacccttaaaaaaaaaacttactggtctgagactcaggcgggcatcacagtcctaccgatatgtgatgtcacccctggaggcccagctgtaaaattcctctctttgtattgtctttatttctcagccggctgacacttatggaaaatagaaagaaactacattgaaatattgggggcaggttcccccaataacaacgagataccatctcacaccagttaaaatggtgatcattaaaaagtcaggaaacaacaggtgctggagaggatgtggagaaatatgaacacttttacactgtttgtgggactgtaaactagttcaaccattgtggaagacagtgtggcgattcctcaaggatctagaactagaaataccacttgacccagccatcccattactgggtatatacccaaaggattataaatcatgctgctataaagacacatgtccatgtatgtttatcgcggcactattcacaatagcaaagacttggaaccaacccaaatgtccatcaatgatagactggattaagaaaatgtggcacatatacaccatggaatactatgcagccataagaaaggatgagttcatatcctttgtagggacatggatgaagctggaaaccatcattctgaacaaactatcacaaggacagaaagccaaacaccacaggttctcactcgtaagtgagaactgaacaatgagaacacttggacacagggtggagaacatcacataccagggcctgtcgtggggtgaggggagtggggagggatagcattaggaaagatacctaatgtaaatgacgagttagtgggtgcagcacaccaacatggcaaatgtatacatatgtaacaaacctgtacattgtgcacatgtaccctagaacttaaagtataataaaaaaaattaaaaaataaaagattaatgggccagggttgtggctcatgtctgtaatcccagcactttgggaggctgaggcaggtggatcaactggggtcagtagttcaagaccatcatggccaacatggcaaaacgtggtctctactaaaaatacaaaatttagccagatgtggtggtgcacacctgtacacacttgtaatctcaactactcaagaggctgaggcataagaatcgcttgaacccggtaggcagaggttacagtgaaccgagatcatgccactgcactccagccctgggccacacagcaagacttcgtctcaaaaaaaaaaaaaagaaaacaagattaatgttccctctgaagaataaacatacatagtggggtattctgcagggtgagtaaagtagaaactttatatattcaacccaaagcatattttgttaattagcactgtggccactccactagaacagagtggaaccccacccacactttgatttggatgctgggactgatgacgtcacatagtgaagtatcatgagaatatttgttacataatgagactctggaaagagcaggagacttcccaagctggttcaaaagtggcttgtgagagcaggaaaatgtgttgtgactatggttaaggagtagggcaagggtaaaggtacccaggcatgtcttgaacttccagcatataccaaagaagggagcactcaggctttattatcaacttgcccaaatagtgtggcttaaaagatgtcagtaatcaatcaaaaaatagattcagattctttaattcaacactgaatgtttactcttgaaactcctgacttctaggttgagaaagacttaatttcctcatgctaaaaaccttatacatgtcctttcttcaagcataaataggaccctttacataactgttgaaagtgcttccgaaatactgcttagacaaattgtctacaatatttttacactagtcttgtgaaaattaatgtttataagactataaaaattgaataacaaaaaagccatttttcaaaaagctgtaaaaatttctgtatgaggttatcataataagcatggcattctataatttctcaactatagcaaaacttcatttctattatttatttatttattatttatttatttattttgagacacagtttcactccagcctgggtgacagagactctgtctcaaaaaaataattgttattattattatacactttcctagaaatcatttaacccaatttatagatttacatttgttcccttgtacttcagtgaaaaacttggaggatccataaatcaaggtggtattttcagatttgtgtggcaaaaaatttgtacagagaggctgggagcggtggctcacacctgtaatcccagcactttgggaggccgaggtgggcagagcacgaagagatcgagaccatcctggctaacatggtgaaaccctgtctctactaaaaatacaaaaaaaattagccaggcgtggtggtgggcgcctatagtcccagcgacttgggaggctgaggcaggagaatggcaagaacccgagaggtggagcttgaagtgagctgagatcgcgccgctgcactccagcctgggcgacagagcgagactctgtctaaaaaaaaaaaaaaaaaaaaaaatatatatatatatatatatacacacacacacacacacacagagaaatgacagatgcaaagcatgtgttctatcaatatgtagaaggtcccttacattttaagttcagtgaaataattagaatgatacaagatactgaactgaaattgtacaatgtggaagcaaaagctctgttactaatgtgcaagtatatcaacaggatttttaaaacacaacatgctaattataccttaaaatatatttctcccagtctgggcaacatgacgaaacctcatctctacaaaaaatacaaaaattagccaggcatggtggcgtgagcctgtgatcctgaggcaggagaacatggtctggaggcaggaaacctaaggctgtttcacgctaacgtccttaagctaaattgatgggaaaaccctaactttccacacctaagtaacaaaaggaccagagactactccctttgcaaacctctaccttttctgcctggcagatgggaaattaaaagtacctctgattggttgctttttgcaaccaatcagatatttgcgtaggagtgtgacttttgtaactttacttcagcctctgattggttgactgactgcaggccaccatttcatttacattaggtcagcaccaagcagccaacgggaaacctctagtagtcatttggacccaagaagattctgtatctgggccactgcttgggcctgttcccacactgtggagtgtactttcattttcaataaattcctgttttcattcttttgatgctgcattctttcattgctttgctgggtgtttcttccaagtctttgttcaaaatgccaagaacctaaacaacttgcagtcaagaccctctactggtaacatattctggtgagctagccaggagagaaggtaggcccaaagtttgggatttctttttctcctttccccttttacatacagggaaatcttcctctctccatcttttcctttccaactgaggaccctcagtggacagcacctaagcacaaagacacttgcaagtttctggccagggccattctctggtgaaactggaaggtttccgtgtggaagtgcctaactgccaccgcttggttaaggtgaggaacctgagtccttttcctcgtttttgtttttctgagtcctattcctttttttttttttctgagttattttccttttctcctttttcagtctttcagcggccgtttcctagtagctcgttggtaattgaggggaactgactggggccactctctggtatcctctgaaggccaaggagtgaacagggatggctgccctgcccagaaagggaaaagactcatttctgtccttttcagttataatccctgatccctatgtgtgatgcagttagcagcagcagctcgtccagggcaaactcacaggtttcaggtgacttatgctgcttttatttatgctaaattcttcccttctcccacccaactggcaaaggacagaaaacccacctagctatgcacaaaaggttacacaagtcagagggtccgggcatgtggtctgtgtggtgcatggtggtggagggaattcatgaaaaggaatttattattgcctaagttgagagcgttaaagggttgttttaagtgagatagaaaaactttaagtcaggtcctcagtgatggagggaaccattccaaagtggtgccagcacccatctaaggtcagagatgtctgacagactaagttggggccctaaaggggggatgccccaggtaaaatttgggtcacctaatgagccctccacttttcaaagtcctcttctcttttccaaaccactatgggcaactctccacctattccacctgattccacacttggctacatcctcaaccatggaaatcaatttgaccctgacactctaaagataaaatgtaaaattttttttgcactattgtctgcccccattatgaactgcccagcctggaacaatgggcagtcttggtagccttaattatgacaccatcctgccattagacctattttgcaagaggcagggcaaatggtcagaaatcccatatgcacaggattttatgaccttataccaaaacctagcaatctgtcaaactcccagaacccacccccaccaccaaaggaaagttctaaggtagaattagatattatagatgatcccccccactcttactttttcttttttgagacagagttttgctctcatcgcccaggctggagtgcaatggcttgatctccgctcactgcaacctccacctcccaggttcaagcaattctcctgcctcagcctcccaggtggctgggattacaggcacacaccaccatgcccatctaattttgtatttttagtagagacggggtttctccatgttggtcaggctggtctcgaactcccgacctcaggtgatctgcccagctcggcctcccaaagtgctgggattacaggcgtgagccaccgtgccaaaccagatgacccccttttacaagagccacttgtctctaagggtgaagagcgaccatccctatagcccccttaccaagtgctcctgaggctaaaaccaggagcaaacactggggaccctactaagtcccccaaacactcagtggggaacaccatattctactctccctccagccttgctaccccgtagggaagcagcaggagccgaatggccagtcctattgcaggtccccttctctataactgatatacagcaatgtaaggaaaagctaggaagctactctaaaaatcctaggaaatttgcagaagggttccaaaagttgaccttattactattgcactccagcctgggcaacagggtggtgacatgataataatgtcaatttacaaagatgatttgagaatcttgtctgtatgcacttaaaaccagctgcaaaacatgtgaagcaacaagtgacagaagtgaaaagaatgtacaaatctaggtggagcacagatttttaggttagtgaaacatactccgtatgtttcccatatcccaaagcaacactgtatttgtcaaaggacactctgaacacaacaagctcagtgacttacattgtaaatttacatcattctccaccatattccatgctgcttaactcacacagtacagtgaccttaatcttccagaaaacatggatatgaaggaaccacacctaatgaagcaggccctctcaccttactgatttattcccagagaccacaatgaaagatgtgtaggaaaggcaagacttcatactttaggatgaaggtcacaaatagtcaactagcctttttaagaaatgtcaaagtgaatacaattattttatatactgaattggccatttccacacacgctcttgatcctttgatgtacatattacctggggttttaacaaattttgtcttgtggttattttaccgtatgtatcattccaggtcaatcctggatggagaagcagacttagttatccatagtatgatttacctaacatggaatctgttgagaaattttttttttttttttttttttgagacggagtcttgctctgtcgcccaggctggagtgcagtggtgcaatctcggctcactgcaagctcagcctcccgggttcaaacaattctcatgcctcagcctcctaagtagctgggactgcaggcacgtgccaccacgcctggctaattatttgtatttttagtagagacggggtttcaccgtgttagccaggatggtctcgatttcctgacctcgtgatctgcctgcctcggcctcccaaagtgctgggattacaggcgtgagccaccgcatctggctgagaaatggtttaaaattttaccacgttaattacatttgcaaggtttctatccagtatgaataatttggtaaagcctgaagacacactactgattaaaggtccttccatgttaagcacactgatatgacttttttcctgtataaattctctcaaactccaaaaacatgaacatttgatttttttatttttttgagacagagtctcactcttgtcacccaggctggagtacaatggcgcaatctcggcttacagcaacctccacatcctggattcaagtgattcttctgcctcagcctcccaagtagcgggattacaggtgcccaccactgcccagctaatttttgtattttttagtagagatggggtttcaccatgctggccaggccggtctcaaactcctgacatcagatgatccacccacctcggcctcccaaagtgctgggattacaggtgtgagccaccatacccagcccatttgatttttaaaaaggcttaccacattcgttacatttgtaagactgttctccagtatgaatactctgatgtttccatttggatgttcgggtaaaaagtcttagcacacacattacatttgtcaaagatgtatattctgaggtctagtgagttcagacacctcggggaagcctctagcacatacatttatacgatttctttccaatataaactctcaagtagtgactgaactctggtgaagcttctgccaccctcatttcatttgtaaagcatatctgcactttgagttatagatccacaagttttgacctttaagtagtattcttgccacatatactacacttctgtgatttctctccaggatgtatattcttatgcctagtgaacacttgcttaaaacttagctatattctggccgggcgcagtggctcacgcctgtaatcccagcactttgggaggccgaggcgggtggatcatgaggtcaggagatcgagaccatcctggctaacaaggtgaaaccccgtctctactaaaaatacaaaaaaaattagccgggcgcggtggcgagcgcctgtagtcccagctactcgggaggctgaggcaggagaatggcgtgaacccaggaagcagagcttgcagtgagccgagattgcgccactgcagtccgcagtcccgcctgggcgacagagcgagactccgtctccaaaaaaaaaaaaaaaaaaaaaaaaaaaaaaaaaaaacttagctatattcactccatgtgtaaatatattaggccataattgcatggctagacagaaatacctgaggctaggtaatgtataaagaggtttaattgactcacaattttgcaggctttataggaaacatggcgctgacgtctgttcaccctctcgggaaacctgaggaaggttaaaatgatggtgggaggtgaagggcatgtcacatggccagaagaacaaacaagagggaggtgccattcactttcgtgcgtgcgtgtgcgtgatggagtctcactctgtcacccaggctagagtgcagtggcgcgatctcggctcactgcaacctccgcctccagggttcaagcaattctcctgactcagcctctcgagtagctggtactaccagtacccgccacgaagcccagctaatttttgtatttttggcagaaacagggtttcaccatgttggccaggctgctcttgaactcctgacctcaagtgatccgcccacctcagcctcccaaagtgctgggattacaggcatgagccagacctcatgagaactatcacaaggacagcaacaaggggatggtactaaaactttcttgagaaagccacccccatcatccaatcacctcccactaggctccacctccaatactggagattactacaattccacatgagacttcaaagggaaaggacaaatatacaagctatatgagtaagtataaattatttggggatcccagaggttaggacaacatctaacggcctttccacattgagtttagttgtaaggttctctccagcatgttttatctgatgtttagtgaggcctgagcgactaatgtaagatttgccacactcattacatttataaggtttttcactagaatgaattcgttggtgtttagtgaggcaagaccgccgcccaaacgccttgccacattccatacatttgtatggcttctctccagtatggtttctctgatggtaaaccaagtttgacctttcgataaaagctttaccacattcattacatttataaggtttctctccagtatgcatcatctgatgattaagcagaattgaacgtactctaaaggctttgccacactcattacatttgtaaggtttctctccagtatgaatactccaatgacgtgcgaggcctgagcgataacggaagaccttgccacattcattacatttgtaaggtttctctccagtatgaattctccgatgccttgccagggttgtagtggagttaaagactttcccacattcaatacatttgtatggcatctctccagtatgtcttctctgatggtacaccagacttgttttatgactaaaagttctaccacattcactacatttgtgtggtttctccccagtaggatttctgtgatatcttgcaagttttgaactttggataaaagcctcaccaaattcattacagtggtaagggttctctccagtatgaattaccagatgtttagtgaggcttgaacgctgagtataggctttgccacaatcattacatttataaggtttctctccggtatgaattttccgatgacgtgctaggcatgagtagtaactgaagaccttgccgcattcgttacactggaaaggtttctctccggtatgacttcgcctatgaattgaaaggtttccactgtcaatgaagaccttgccacacacattacatttgtaaggtttctctccggtatgcattctttgatgacgtgctaggcatgaatagtaagtgaagaccatgccacatttattacaatggagaggtttctctccagtatgacatctcatatgaaccgaaaggtatccaccgtaattaaagaccttgccacacacattacatttgtaaggtttctctccggtatgaattctctgatgtacagttagtaatgagccccaattaaaggctttgccacattcattacatttgtaaggtttctctccagtatgaactctctgatgcactgcaagatgtgaatgttgactgaagaccttgccacattcattacatttgtagggtttctctccagtatgaattctccggtgccctgcaagacgtgaacgttgaaagaagaccttgccacattcattacatttgtaaggtgtctctccagtatgaattatctggtgccttacaagttgtgaattctgataaaagaccttgccacatacatcacatgtatatggtttctttcctgcatggattatatgatgtgcagtgaggcttgagttccgtttaaaggttttgccacattcattacatttgtagggtttgtctccagtatgaactgtctgatgagttgcaagagaggaactttgactaaagcacttcccacatcgattacatttgtaaggtttctctccagtatgaattctctgatgaactgcaaggtgggaacttttactaaaggacttgccacattcattacatatgtagggtttgtctccagtgtgacttctccggtgatttacaagatctgaattttgtctgaagatcctgccacatacatcacattggtatggtttccctcttgtatggactatctgatgtactgttagtagtgagccccgatgaaaggctttaccagactcattgcatctgtaaggtttctctgtagtatgtatcatctgatgattaataagacttgaagacactctgaaggctttgccacactcattacctatgtaaggtttttccctaatatgtgttttctcgtcttgtgtaggtaacgaaagttgcaaaaaatcattcccatatttcctagaaatgttggtttggacaccaggaaaaattctttgaagtggtgaagctaaaaaacaattattaactgtcctctcaatttgattacatccataaattttctctgcagtttgaaatttctgcaattcacccagaccggactgaaaccttaatataagctgattttccatatgcttgttttctacgtccccttgactatgtcgaactctttgaccagtaagattgtttttatgggtcatcggcccttctttataatttatttcaccatctttccattgaaagtcaacttcctgtagatttttccggatttccctgaagtaaaaattttcagtgtcatagctttcatgtccttccaacatcactgcttggaatttttctcctgtgttactgttctgtattggtggtaattccttgatcacacatttaggagagatacctgcaaaatataatgaacatggggttttaaaataactattattggtaaatattattttatactgaaaacacactacgctaaacataatgtttatactagcaagttgtgaaacttttctaccatgatcttctatttgtagaaatgcaaaatgaatagaattctatagtaaagaaaaagtgattacatgtaatttaaatcaattttaggaaagcctagtttcaaacatccttcgaccaaaagactcatgttatgcaaacatatatgagcaccaaaacaagtattttgcaatcgctgaccccaaatgacacaccaattggcagtaaacatatggctccctcataataggagagaaaaaaagttacatatatttatttcatacaaatgaatgccaagcaacagcaagatatactgtaatggtaaatattaactaataaataatcataatataaattaattaataaaacattctaatagcctgtgataaaaccagcaggtaaataatgaacaaccacaaaatacaaatctatagtatgaaattctaaacaattctccatcaataataagcaagaatttatattctagaggcagtatataactagaaaatatgttgagatcactggcttttaaagataaaagaaaggtaaatatgtctatggccataccaccgtgaatgcatctgatcttgtctgatctcagaaactaagcagtgtcagaactggttagtacttggatgagagaaaggtaaatatataaaataataaagaataaaaattggggacaggtcagccgggcacggtggctcaagcctgtaatcccagcactttgggaggccgaggtgggtggatcacgaggtcaggagttcaagactagcttggccaacatggtgaaatctcgtctgtactaaaagtaaaaaaaatcagccgggtgtggtggcacgtgcctgtaatcccagctactccggagcctgagacaggagaatcattggaacccaggaggcggaggttgcagtgagccaagatttcgccactgcactccagcctgggcgacagagcagtctcaaaaaaaaaaaaaaaaatggagacaggtatggtggctcagacctataatcccagcattttgagaggccaaggtgggcagatcacttgaggccaagagtttgagactagccaggccaacatggtgaaacctcatctctactaaaaatataaaacattagccaagcgtggtgatgcatgcctgtaatcccaactactcaggaggctgaagcacgagaatcacataaacctgtaagggggaggttgcagtcagccaagatcacgacactgcacttcagcctgggcaacagagcgagactgcctcaaaaaaagaataaaacttgggaaaggaaatcagaaatctcagttatgatttcatgcctacaactatgtaacaaacaacagagcaagtccctatgtattcattgtctttttttgcttttggctgagatggagtctcactctgtcacccaggctggagtacagtggcatgatcccacctcactgcaacctccaactcacaggctcaagcgatcctcccacctcagcctcctgagagctgggaccacagatgcatgccatcatgcccggttaatttttttgtagttttggtagagatgaggttttgccatgttgcccaggctggtctggaactcctaagctcaaacaatctgcccacctctgcctcccaaagtgctgggattataggcatgagccaccgtgcccagtcctattcactgtctttattatccagttccttggccacaaaatatatatgatacagagattgtacttggaaaatgcatgaactgagataaaagacaacaccgtttggaccaaactgcaaaatgaaaacttacagatacaatgtagactgctctgatataaagacttatgtctgccaaaattcctatgttaaggccccatcctcaatgtgatagtatttggaagtgtggtctttggaaggcaattaggtcaggatggtgcatagaacttcaggaatgcaattagcagaaacgtgaaaaagcctctgctttttgcatgacaatctctctgccacatgagaacacagagtcagccatggcacaccagaaaaaagtccacaccaagaaccaaagtggctggctctgacatgttgaactttgcaccacccagatctgtgaaaagtccatttctgctgtttaaaccaccctatctatggtatctgatatagctagtcatgctgactaaggtaaagccaatatgctatctcattataaacatgaaacaatgttgatacacgttattaaacaaatttgtgagtctgtactataaaacatgcaatattctaagctagctaacagcattaacttgtttaaaaagtctttaggtaaattatcactatttaacaaacaagcacactaaatatgcccacaggatttatgtatctatacccaatttacaaagaaagtaagacacaagaacctgggtttgcaagatcaaacatgttttttaaaaacaacttcccaaacaagcagtgcagataacaggtcaacccaaatatcaagagtgtagaaatacttcaagagccattttgtgtagagcacctgattctgtcgctgttcagggtgccactatgtaacccacatggacctaggaggactgaacaaagggggcgaatgcgggaataaaagacaagagacaaaagagtatatttggaagaaggggtcaggggcaccttgcctgtagtggacaagggccctgagctttacacagccgtccgtatttattaggcaagagagatagtgagaaggatggtggaagaaggggtcagctgcgcagtccagagtaggcttgcaagactgcattcctcaaacaacaggctctagatatggcagtagataaccctggcaccaggaagtgattgcctccagcaaaccttctgtcagcaggagcagtcatgagtttgcccacatcctgcattcatgataaacagtttgctgtttgatcatatagcctccagtggaatgctgagttggtcacgtcccacaggctttggctccctgcaatgctgtgttgccaaaagcattattcagccatccgtcatgaataacgaacggtatctgagtcatcatcccctgcacatattgatttacgcagtgttatcagacagtggtcaagtgaatgagtaggggtcaccccttacagagtgagagtagcatgggaggtgagggagttctgcaataatgggagtataaaattaatatgctagtcagtaactgggtagtccatctggacaaagtaatatgttaggaaaggcccaggaggacaaagggcaagaggggagatcaaggagtaatgagcatggagcagcagggtttgtgcttgaagagctgtgggaatagaattgcacaagaaacagctaaaatcctggctttggaagaaaagagaaactaatgtagaggtagtattgtactgactaatacttaaacatgagaattatactatgggtgcaggacaacaagggaagacaattaaaaaggaggcggtgtgatgatatgggaagaaaacagatttatgtctctataatatttgctatgaaatttatcaaactgaatgtcccataagttctatttccaggtatatgctcaacaaccctacatatcaagagatatgtgaaagactgttcttacaattcaatccttaagaaaaaacctgaaaatggccacgaagaggagatggatgaattcattttgtacacacacaaagacaccacaaaactttactgatagtacaagaacgttaaggagacggggtgcagaatgaggacccgtagcacaacaggcaaagatttgagaaaacaaagaaagcaggagactcttgtcaaggtttaaatatatgttaatggagacacagtatatacgatgaaagtatcctgggatatcaaaaacacaacatggaagcagatctgtaaaaagtcatttctgtatgtaattgaagttaagctgttattagtttaaaataggatgttataaatctaaagtgttttctgtaattgcaacggtaaccacagagaatgtatagaagacacacacaatggaaataaaactatttcaggaaaaaaaaatcaactatataaaaacgaaggcagtaagacaaacagaacaaaaaaatctaaaagagatatagaaagcacttaacacaatggcaatataagtccttttctatcagtaattacattaaatgtaagtgtttatactccacagtcaaaagacagagactggctgaataaatttttaaaactggcttcagctgcacactatccagaaaatactcattttaattcaaaggacacacataggctgaactgaagggatgaaaaaagatatgccctcaaaatgttaaccgaaagacatcagaggtggctaaactgatgtcagccaaaatagactttatgtcaaaactggtacaagagacaaagaagggcattatataatgattaaaaggttaattcactaggaggatataacaatatgtgcctatatagagatcctcaatatgtgaagcaaaattaacgtaactaaagggagaagtagttccacagtaataataagagacttcaatggcctatttttacttataaataggacaatcagacagaagaaaaacaaggaactagagaacctaaactatatatcaagttgaacctaacctatatatgcataacacatcacccaaaaacagtgcaatacaaatttttcagaactgcacatgaaacatttttcaaaagaaatatcggaaaagaaaaaaaattttaaactttttaaagactaaaatcgtaaagcataacttatcccatcataataaaataaaactagagatcaacagcagaagaaaattagattatcaacaaatatgtggaaacaacatactcttaggccggtgtggtggctcacgcctgtaatcccagcaatttgggtggctgaggcaggtggatcacctgaggtcaggagttcgagaccagcctggccaacatagtgaaaccctcagccaagcatggtggcagatgcctgtaatcccagctactcgggaggctgaggcaggagaatcgcttgaacccaggaagtggaggttgcagtgagccgagattgcaccactgcactccagcctggacaacaagagcgtaactccgtctcaaaaaacaaaaacaaacaaacaaggaccatactcttaaacagccaatatgtcaaattagaaatcacaagggaaattttaaaaatctcaaaacaaaggaaaatgaaaatagaacataccaaaacttgtgaatgcaggaaaaacagtgctaagatagaaaatctgcagatataaatgctaacattaaaacagaagatatccaatggaacagaataggaaacccagaaatacagccacacacctacaaccaactgatccttgatagtcaaaaaaaaattgggaaaagacattctattcaataaagggtgctagaaaaactggctagccatatatagaagaatgaaactggactcctatctcttgtcatatacaaaaattaattcaagatgaataacgacttacattaagtcttcaagctacaaaaattctagaagaaaatctaggaaaaacttttctggacaaaatacaagttgttgtttttttttcttttttttttttagagacagggtcttgctctgtcgcccaggctgaagtacagcagtgtgatctcagctcaatgcaacctctgcctactggcttcaagcaattctcttgtctcagcctcccaagtagctgagattacatgcatgtgccaccacacccggctaatttttttgtatttttagtagaaacagggattcaccatgttggtcaggctggtctcgaactcctgacctcagacctcaaaatgatccgcctgcctcagcctcccaaagtgctgggattacaggcatgagccattgctcctggcccaataccagttttttaagagaatttattcttcattgcttgagcatcacgaaaaaaatatataggttttataaatagtagagaagtccctgaagtgtaagaaatgggctaagtttaaaataaagttagatttttaaataatgattcagtataacatgatggacatgaatgtagataggagaatagttattataatacagcatttgttccaagaaagaaaaaaacagtgcaatttgaacaaaacccagcaagctatatttaggaaactgaaacttactacagaaaagcaatgtatgttatataacaaagaacgatcaatctattaaatggtatttccacaattaagatagtaacttaaaaaattatgctcaagatattaaaaatttccaacttaaaaactgtaatcaatttaaccgacaaatatatactttcatagtaggaattaagtcaggtgaaacagaagtaaaaggaataactgatactatcaatacaacattatggagtttctgtaagttttagggaaactgctgctgagctataccatctgtactaaagaaggaaatcttgtaaaatacataaaacaatatgcattccccaacacaacactaccacaatagaaacataaaacaaagaaaactgagtatcctcaaaaatatggaactgattaaataaataaaaacaaagttcatttataatacatgaaaatgcatcagatgaaagcaatggttgcttaaaacgaattttgtggacttaaaaaagataagcctcattcaacttcattagcttcctcaagatcaaagtcgtactcactataaacaaaaatactggggaagaaaagtgtggcatgagcagtggttcaggcaacagccctgcagagatgaagctgtgaacctggacaatgttcttcccgggagaaatttttttttttgagacaaagtctcgctcttgttccccaggctagagtgcatggcgcaatctcagctcactacaacctccgcctcccagatttgagagattctcctgcctcagccccccgagtagctgggattacaggtgcctgccaccacgcccggctaacttttgtatttttagtagagacggggtttcaccaagttggccaggctggtctagaactcctaacctcaggtgatccacccgcctcagcctcccaaagtgctgggattacaggcgttgagccaccgtgcccggcatgggagaaattcctacaccattcactgctagctcaaaaaagaggaccattagtatatgagatcaacattgccacagtacccttgaaagatacttttgtgacatttctcagaaaccaggctcttgtgatggtctctatctgaatatcatgacaaatgctgatcattctactctggctttaatagttacctctgtatgtagcaagatgatgttaaaactcattactcaaagtgctctccttcaaaaattttctcttacccagtaaactcactccatacaatagtccacaagatattcataaccccaagatgggttatcacagcaggaaaaaagcataaaatgtccgaccctagaaatgcatttatccaaagcaagtctcagaggcaaaaaatcacacaaacataaaagagaatgcaagatcagaaagagccaaggcataaacaagacagagaaaaacacaggaattggattgtgagggatcttgaaatgagacagtgctctgtccacagatcccaaactaagagtgtgaagacagagatacgctccctgtgtaggactaagaataaagagaggacctttgtgtcaactgtctttacaattcttatatgtaacaatctcaggagacccaactcattcccgtgtcacaaacccaagaagagtgtccaaagaagaactaagaaaatggctgagggacctgaacaggcagagagggctgaagatagtccagttctaggaccccagcttcaaaggaagggcaaccaatgtttcctcatctcctgaccagcactttcaagtataggaaatggggtggaaccagaaaagttccaggcaccaggactatggagccctcagctccaatctatatggatcagagaactgaggatcagatggaatcaagaacaggaggagagaccacacgggaaagagacttctttgaaaaggcccttcccatgccacagagtcaaagcatcagagttcacacaatacagatgacactgtggtccatcataacagtcttgtactttgctctgtttgagctgcagcaacccctggagagtgaaaggtaaagttatacgtgtctggaaagcaaagtgataagcaggaaagaagaaaacttctggagctcacagaaaatcaaatttgtttccccacagaactctcccacttgcagagtcttacgcacacaatttcatggtaccgcttccattgtgcccatctgagctcttaccggtgatcacgcctttcatgcattccccacagtttgggttcctcgctattttcacttggctcaccacagtccagggctctttcccttgctccaacatggagataatattcaggtcaggaagacagagtcctgcttataaaaaaagaaagaagatgtcccacggtttttccagaacccagcctaatgtctaggtagaagagaaaacactgcagttgaatctacaaaatatttcacaaactcatccattgattgcctccttctgaatgcttagtgaacactgtaagatgaagatatctagctctctcccaagaaatactgaatcaaaaacacagggataggccaagcatactggctcaagcctgtaatctcagcactttgggaggccaagacgggaagatgacttgagcacaggagttcaagatcagcctaggcaacagagtgaaaccctgtctctacctgggcatggtgttgcacacccacagtcccagctacttggaaggctaaggtgggaggatggctttatcccaagaagctaaggttgcagtgtgccaagatcacaagatcacaccactgcactccagcctgggtgacagactgagactgtgtcaaaaaaaaaaaaaaaaagcacaaggatagaaaacaggaagaacagggaattggatatattaactccgccataaggttttacacgtacctcagctctggagtcaccactaatgtacaaagaaggaagcagaatatccatagaaatgggacagttaaaggccagatgcagcattatgaagctttttatttgtgaatcaacaaggcttcagtctctgtcaaataatgtagggcctcacaagaaacacaataaggaaagtacaaaaatgcacaagggaagatcctaacttctggaggaaaactatcctcacccaggaagccgaggttcctgtagttctccaacatcacgtccctgtacaaagctttctgaacagggtccaggcatttccactcctcctgagagaattctacagccacatccctgaatgtcaaagatccctgaaatgaaaaacacatttcaatatgagcagtgggtgagctcttatctttacataaaatgagaagaggagagaactgtcacatcaatttgattgaagtgtgttttgacatatccattaaaagtatctgtgagataattacgtctccctgattttgggttttataaaattcaataggagattaggatattatctaaatcggtgcacatttctcacttttgtggacaaaataagaaataaacacatggttatccctatgaaagttttagatattacatttgttacaccaagtgaggtgtccagatgagctagaatacaagtggtgtcttcagagatgacaatgttcttagtggctttaaagaaaggtcagaaactaaaaacagcgatgacaagagcaacagcaagaactaaagttttggaacactccccatgtaccgggcattacttcaaaggatttacgtgttctaactcaaatgatgacataatcacctatgacagaaatatttcttcccatcttactagaagacaactgtgtcacagacaggctaagaaagtcacctaggtcaacaacctgcaaacagcagagcaagcacctgaacccagatgtctaaaaattagagttgaatcaacagaatccgacagttatattacagagtatgtcctagtctttctgtgtggctataacgaaataagagagactaactaacttatgaacaacagaaatgtatttctcatgattctgctggctggggaatccaagatcaaggtgtcagcaggactgatgtcgctgagggctaatccctgcttcgaagatggtcttgttgctgcataggggacgaatgctacagtatactgacagagggttgcctgagaaaacttgaagcaagttcaagattaacttggaaccgcataaaggatcattatataggctaggcgtggtggctcacacctccatcttagcaccttgggaggccaagatgggtggatcatgaggtcaagagatcgagatcatcctggccaatatggtgaaaccccatctctactaaaaatacaaaaattagctgggcgtggtggtgtgcacctgtagtcccagctactggggaggctgacacagaattacttgaacctgggaggtggaggttgcagtgggccgagatcatgccactgcactccagcctggagacagagtgagaccccatctcaaaaacaaagaaaaaaaagatcatcatataagcacacagaagcacacacataatacattactattcataaaactaatccattcacatgataatatagaaggcaattttaaaaattaagcaaatcactgggacaaagaaatatgtaaaaaagtttttataatcccagcactttgggaggccgaggtgggcggatcacaaggtcaggagatcgagaccatcctggctaacacggtgaaaccctgtctctactaaaaatacaaaaaattagccgggtgtggtggccggcgcctgtaatcccagctactcgggaggctgaggcaggagaatggcatgaacccgggaagcagggcttgcagtgagccgagatcgcaccactgcactccagcctgggtgacagagcaagactccatctcggaaaaaaaaaaaaaaaaagtttttaaagaaaaaacattttaaggccatagaaacatttaagatataattttcaatagtgttcccaagcctgtatcttatgtagagaaaagaaaaaaattaaaataaaaccaagtaaataatttcaactgtgaaaagataataggctgatttatgaaatgatgatgttgtaaataaaaaccaaagcatacaaacatttaaattaactgaaataagacgctatctctcaatgacatattttttggatgactttttaaatcattattcttagacatgtatgttttagcatgcttgggacaatgaaaatgtataaattgtatttcatttactttgtacttagtacttcatttacttatttacttagtacttcatttacttatttattttgtacttattcaatactaggctggagaaaatggtacaaaattttaaaagtatataaacttttattacaattactattaaatgcctatatttaaatatctaagtgcaattttatccagttaaatttagctacttatgcattaacaaaagccaaatggagtttattcgtttattccaccaataaataaaacagtgattcaagattaggtggtttataagtgtaatacattaaaatttaacagattaagatagaaacaatatgtattgcagcagtatatgcttgcataaattattagaaaatttaaaaatcatgttgcaaaggaaatctgtaaaaaaaaaaaaaaaaaaaaaacccaaaaactgttaaggaaaaatatttcacccaacaagtgaaacactggattcatttcctctaaattaagtaagagaaaagggggtttttcatttcctctaaattaagagaaaagggggttggccagacctcctgtcattcaccactgcactggatgtctgagcagcagcaaagagaaaaggtgggagggaaaaaggcaaggagggggtagagccaaagagttagatctactaaaattaagagataacatgattgtggccgggcacggtggctcatacctgtaattccagcactttgggaggccaaggcgggaggatcacctgaggttgggagttcaagaccagcctgaccaacatggagaaatcccgtctctactaaaaatacaaaattagccgagcatggtggcacatgcctgtaatcccagctactagggaggctgagccaggaggatcgcttgaacctgggaggcggaggttgcggtgagctgagatcgcactattgtactccagcctgggcaacaagagcgaaactccatctcagggaaaaaaaaaaaaaaaaaaagagataacatgattgcaacccagaaaaagaatgtttaagtatacaagctaacaatgctaacaatgtactgaaataatcttcctactttagtaacactaatttaaaaacaacacacacacttctaaattttcattagcatatataccatggcacttaagtacaatacattttcagaattatgtgaacaaattataaaactacactgagtgatgtcggcaagataaaggaacaggaatccccaaactctccagtcaccacagtgaaatgattttaacaacaattcatggactaattgcctcggggataaatccagaaaacagttaggaggtttctacacctcaggctgacataaagcaaacagtatagaagctctgaaggaaaatttgaagcatccacttgacagagatccagcccctgccatgcactggggtaacagaaaagaaacccacaactcccaagatcatctaggggatggaaaggagcagaatatctgtccaacttcctgacttttcagatgaccaactgatgggctggtttctctcttcctgaatataagcactgacaagaacaaggtgaaaggttaggggccactgagaaaaaggatgatttacataaaccagtgtgtgcagtaacacagacaaacgctaagtgcatatctagtactacagcttactgtagcaccaaagtctgcaatatcaaagacagacaacaggggagcttctgggtagaaactagcaaacattttcaatgaagagatgacaagcaaaggcccagagaggacaaaatccccagccagaaaaggtgtggaaggtctccacaatctagctgagttgactccagagtgtcctccctgaacaaagcaaccacccaaaactggggaggtagatgatttttaaaatagggaagtgccaaaagaagataataaaacttacaaagaaataggaaaatacagtccataaaaagaaaccaattaagtctctacaaacctacactaaagaaatggtgatttaaatcttggctttgaagaactaaaaggaaatggggatcaccctcagtatatgcagaggattggttccaagattccctaaggggaccaaaatctatggatactgaagtcccttatataaaaaggcatagtatttgcatataacctacctatatcttcccatatgatttaaatcatctctacattacttataatagctaatacaatgtaaatgctacataagtagttgttatactgcattgtttaggaaataatgacaagaaaaaaaggaccatacgtgttcaacacagatgaaaccatccatttttttctggctatttgtagttcatagttggctccatctatggctgcacgagccatgaatacagagggctgactatatgtgaattaccaaagaatttgaaatagcagccacaagaatgctcaatgagttaaaagatagcacacacagacaagctcacgaaatcaggaaaactatatgaactatgcatgcaaagaagaatatcaacagaaatagaagctataaagaaaaatcaaaaagaaattctaaggctgggcaccgtggctcacgcctgtaattccaacactctgggagcccaagatggggtaattgcttaagcccaggagttctgagaccagccagggcaacatggcaaaatcccatctctacaaagagtacaaaaattaggcaggtgtgatggtgcatgcctgtagtcccagctactcaggaggctgaagtgggaggttcatttgaacccgggaggcagaggatacagtgatccaagatcgtgccactgcactccagcctgggaaagagtgaaaccctgcctgaaaacaaaacaaaagaaagaaaaaaagtcgagttaaaaatacaataactgagttgaaaaattcgctagatgaattcaacagctgacttaatgaggcagaagaaggaatcagtgaactcaaaggggattttgacacggaggaaaacaaaaactataaaaaataaagaaaaataaagagagtctaaagggctcatggggaaaccatcaagcatcaagaacgtatgtatcctgaaagcccaataaataatgtgaatatacctaacattactaaactgtaagcaaacaaacaagctttactgaaagacataataaagatatgatcactgactgacaaactcaattcttataggaagatgtgatggtgacaagacctgcgactgtaaaaattcatggccattcaaacacaaacaaaatatgtgggaatttaataaaatgtgactgttgtataaaaaaagaaccaacaaaattttggaaagaaaatggagaggtttgccaatcttcatatgaacctattatgacatttataatctgaaactttaaaagcaatcaaatataatctacaaaaagatatacacaaaaattcaaattaaagattcaatcaaaaaaattcatgcaaagaaaatgtaagcaagaaacatgagattttaaagaaacttcatattttataatcacaccgtgagccaggccttccagaagataaaacaaacatttacttatttttgcttttgtggtataccatcctaaaagaagcaatcattctttgaactgccattgaagtaaccctcagacacttgtggtgaagacagcatgcacagaggaagccacagtgacattctttgcaaaaatgaaaaattgtaaaagatccatatgtcttcatttagaaattgctccaaagaggatgcaaaatacgctattagtgtttattaacataaaaacatgtacatttcaggctgggcacggtggctgacacctgtaatcccagcactttgggaggctgaggcaggcggatcactaggtcaggagatcgagaccatcctggttaacacggtgaaaccccatctcaactaaaaatacaaaaaattaactgggcacagtggtaggtgcctgtagtcccagctactcaggaggctgaggcaggagaatggtgtgaacccgggaggcggagtttgcagtgagctgagattgcgtcactgcactccagcctgggcgacagagcaagactccgtctcaaaaaaaaaaaaaaaatgtacatttcaaaaacttgcaaaatacagcagaacattcacttaagaattgttttctaaaatctcataatgacgtgtaaatgcatcttgacacctctcactgactcttgccacagaacttacaatagtagctcctcaatgaaacatgaggcatggtggagaatgtgacagggaaaaggaacctgggttcctctgggtgggtaattgaaagagtgattgcctcttctaggatggtgcatttcctattttggtgaatctggcaagattccccactaccccaagttcaagggtgccccctcccaccaatgacacatgacatgtcccactctttaaaaaaaaaaaaaaaaatactactatgttcttttttctctttgaggatctaaaaaaaataaaaattctttgtatttccattttccaattccttggactgtgaggacatttcattattttgtggaaatcaaaataaaataattttcattttatgctcaattttcttttactgcattctaggagctatttcatgttctgtagttaaaagtttttaaatatatatgccttgatgttctttttttaggttatgaagggtgttcttgatgccctgttttttacttgtttgcttacaaattttattgtgtatatttaaggtacacaatatagcaaggtatagatagtaaaaaactcacgacagtttaacaaattagtatatccgtatctcatagttaccttttttttttttttgcttttgtggcaaaaacagctaaaatctcatttagcataaatttcacatataataacacgttattccctaccatccttatgttgcatcaccttcttaatgtctaaattccatctctgcttggacttttaccacaaaacaaatatatatatcatgtgatgtttaaaataaatgtaatatttaataataattggtggaatgacagaatttggctccatcttctctgacatcaaaaaagtttggctcttacatctgagcaaaattataaccgttttacaaaaaacaactgccggtaagagtcccagcaggaacaccacattctctgtgggatggatatgctgagaatggctaaattaatctgacattcaggttgatttcatattttaaaatcaatgatggaataaaacaacctctatcactgatgtctgtacctagttttccattccattcccggtcattaagattgtggagttagaaagagtgactgattcattatagcttcaaatgtggtataaaatcaggcagaaaagatctccccttagaggcatcttttcaagaatttatgaggtatttttgcatattaacatgtgacttccacatacagcttctctactcctggtctactgagagctgacagtgcattcagatgttgcccctaaacaatctctgctgcccaaaagctgacaccacagaactcacaccctgtctccatccatgtctgggtgtgagcccttcccaggaccatgcccagtggagcctcttcccaagctcatgtcactgagtcactgtgagatctggaatctaagtgcagaagagagggactgaaggaaggcatgggtgagtgcgagcaaatgtgtcaggcaggatacttcagactcagagaagatttgcagctccaatgccctgcatttcaaaaagggaggagacagaacaatccaccaagattatcactttacctgaggaagagccatccctggctccttttctttcttctttctctcctgggcctctctctcagtcaatataattaattctttaaaagtcaaatctgaaagtcaaaaatatgttgtttaatccttggaaacaacacattcctttctgtgccacaaccatgcccacagggaaggcctcagcatgtggagagacagcccagtgcaccagggggatgcaagcataataaactcctacacaaagaccaagtaagtttttcacccttttcttcagaacttgttcccctcccagagaagcccccacacaccctgcaacagtggggagctgggctggactatgcttcccttcaggacacagacccatccctgatcaaaccccatacagagcacagccccctcacctccctgtggatcacaggctgagctcagctctcagaaacagaagacacaaaggctggacgctcaatgctggatacaaattagaatcaatttgggtactttaaacaatatggaggttgagtccatcctacctactggaagtggaatctatggtaaaagggcacaaaacgtgtatttgcaaactgcctcagcacgctaatgtgaagccagggttgaacacatcttaaagggggcaagactagcacagccccatcctcccagctctgctgtccccttggggcttcactgttaccagtttgtagacagtagaacacaatggaccagaaacacagagacacataatatgcaccaggggtggggtgagggtgtggctggagtgttaaatggtgagaggagggtgaggcacagaagtcccaatggagaaggtgatatcagaacaaagacctcaagaaggaaggatgtttgcacctgcagctgaggggccagacagcccaggtagaggccctgaggcaggagcaacctcagcccagggaacaggaaagaggcctgtgtggctggagcagagggagcaggaaggacacagggaggagatgaggtcagagaggttctggggagcagattaggtagagatgaggtattcaaacatctttctcccacagctcacagtaatttcagaaactatgcatttcctcaccctttttaagtaaacataacttttctttatcacatgaattaaagcacttctttttaatgtcatgttttctctgtttcaaatatatgctgacatgtaaagctaaagccaggaagtacagggtcaccatcatctgagatgtgcaggagtgcaggggaatgtacttggtgagttcaggcaatcacttttggtggagatacctgttagatggctaagcagagagaggagaggacaaaaggacacagaattctagagttcaggggacaggtctgcaggggacatggagacgtgtaggtgggtaggtgggtgatatggatcagctctgtgtccctggcccaaatctcacactgaattgtaatccccactgttactggtggggcctggtgggaggtggatggatcatgggggtggatttgtgatgaatggtttcacaccaccccttggtgctgttcttatcatagtgagttctcacgacatctggttgtttagaagtgtgtagcgcctcccccctcactctctcttgctcctgctcccgccatgtgagacgcctgttcctccttcacctgccatgactggaatcttcttgcagcctccccagaagcagatgtcgccatgcttcctgtgcagcctgcagaactgtgagccaattaaacctgttttctttataaattacccagtctccagtatttcattatagcaattcaagaatggactaatacagtggggtttaaattcataagatgagatgatgaggaaagacagtgggtgtggacagaaacaagaagaggttcaaggactaagccatgagtcattcccacattgggaaacattcagagtcaggacacagcagcagaggaaagtgtgaaatggtcagggaggtgacaagaaaatcaaatagctcctgacaggcaaagaaagagtaaagcaggaaatgaaatacattggatttagaaatggggaggtcactggtgactctgaaaaataaagttatcagtggaatggtggatatgaaagtttcatccaatgcattcaagacacaattggaggcaacaagtgaagacagagactctgaacaagattgtattgtattatggtcttaaatgaagcacagaagaggggtactcactacaggcagaaacacagttaatggtatgttttgttttaattagggcacagtggaaggaaactagaggctttagggtctgtgtgtgtgcatgcatttaatgggcaatacaccaccatcagtaaacactgtttaaagtaattctgtagaagtaaaaatgaatgacacagttaaacaaattttatggaagcccaaagtattttcgttgttttctttttaacttatattttaagttcaggggtacatgtgcaggacgtgcaggctggttacataggtaaatgggtcatggggatgtgttgtacacattatttcatcatccgggtattaagcctagtattcataagttatttttcctgatcatctccctcctcccaccttccactctcaggtagatcccagtgtgtgttgtttccctctatgtgtccaagtattctcatcatttacctcccacttgtaagtgagaacatgcagtatttggttttctgttcccgtgttagtttgctaaggataatggcctccagctccatccatgtcctgggaaaggacatgatctcattgttttttatgggaaggctgttgttttggactagcctcccgaactaccagaccaagccagaatgaagtctcttgtgctgagtgccacattatcaaactgaaccttgaaatgggccaggtttaggggaaaaaaaactccaaaaaataaacagagaggcccggcgcggtggctcacacttgtaatcccagcactttgggaggctgaggtgggcaaatcacctgaggtcaggagattgagaccagcctggccaacgtggtgaaaccccgtctctactaaaaatacaaaaattagctgggcacggtggtccatgcctgtaatgaccccacccccgaatactggcaccactatctactaaaacagatatcttcaatgatgcacacatgccccaatgagaccccaacatcttccaaggaaactctccatattgacatttagataatgcatccaaaatgcatctataaccatcttaacgtgcagcccaaaatactccaaaaaaaaaaaaaaaaacaaaggtagcccccctaaatgatctctgtgattttccagataatacttcggtaagttgcatgattcctgcactcccaaaagaccccgcagaagtcaccatgaaaagtgcttatggcagtacagttctgggttccacgctctcaagaccaacgaaccaaccctccagctgcccaacctccctgtggactccacttaggccttgcttctcacttcagttgacgatagaacaatatgagtttggattgtatgggtccatttataaaagaatttacttcaataaacatctgaaaaatattttgaagacttgcaacaatttgaaaaaactcacagatgaaccatgtaccctaattaagaaaaaggtatgccagaaatgcataaaatatatgtaactattagtctattttatcacttagtaccataaaacacacacaaatctattctaagttaaaatgtaccaaatttatataaacacctctagactgtatatggttccatctacagtcaaaataaatgtaaaaaaatgtaaagacgcagtattcaatcataactgcattaatgaactgtactacatactgaacttctataataatttcatagccacctcccattgctattgtggtgagctcaggtacctgcttaatgtgccccgtgatgttaatcatctccatgtgaactgttaatctctctagtaaattgcagaccgcagtaaaaattgatctctgtggttctggcacatttttcattgtttggtgcaatacgataaactctgaataacaacacaggacccatctgaagtgccactagtgatgctggaagtgctcccaagaagtagagaaaagccatgacattataagaacatgttgacttgcttaatacgtaccatagattgaggtgtgcgattcagttgcccgccatttcaagataaattaatctggtgtaaggaccactgttaaaagagaaaattcatgaagccgtcactgcagctacaccagtaggcacgaaaacaatgtactttttgctaaataccttttttatctcatattgaaaatgcagctttatacaggggcaaaatcactataatgaaggcatacctgtagactctaatatgatttgagaaaaagggaagttattttatgacaactttaggaaggtaaaggatctaaagctggagagtttgatgccagcaaaatatggactgataatttaagaagtttggcttaaaaaatgtcaagataacagaagcagccactccaaccaagaggcagtagatggggtcccaaatgctatgaagaaaatcattaatgagccaggcatgattgctcacccctgtaatcccagcactgtggaaggccaaggtgggcaggtcactagagcccagaagttccagaccagactgggcaacatggcaaaaccccgagtctactaaaaaatacaaaaaaaaacagccggacatggtgacacacgcttgtagtttcagctactcgggaggctgaggtgagaggatgccttcagcccgggaggcggacattacagtgagccgaggtcacatcactgcactccagcctgagcaaccgagcaaaaaataaagaaactgtggcattccaaaatgatccatgcacaaccactcataatcccacttccaagtgcttctgccagacctaagaaattcctttccaagagttccacataccccttgctcttataaccacacttgggacaggtgcacacaccataccatggctcatctgaaggcccacccttgctttctggagccttctatggactcccctccattttcccccatttttctacctctcctccatgcatgcatgaacaaactaggctaaaaggtacaggatctctgggcacatgcaacacagcaggagtgtacacaaactgcaaactgaaggaccctgggccttcagtatgaagaccacaaagttgggcctgctgagaaaacttgccagcaagtgctgacaatattaagtctagtttaaaggcagctgggcattggctagattaagttcagtgaggatgtctcagaagaggggccctaaatctttctatacactaaagacaaaatatctgaaaaaagaaataaagaaaacagtcctatttgtaatagcatcaaaaggaataaaatacttaggaacagatttaaccagtgaagtaaaagatctgtacactgaaagctcttaagacactgataaaagatattgaagaggccaggaaagtggctcatgcctgtaatcccagtgctttgggaggctgaggtgggaggattgcttgaggtcaggagtttgagaccagcctgggcaacatagtgagactctttctctacaaagaaaagaaattagccaggtatggtggtgcatacctgtagtcttagcccttcacccaggtatggtcgtgcatacctatagtcttagctacctgggagcctgaggcaggagggttgcctgagcccaggagttcaaacctgcagtgaggtatgatcgccccactgcatgccagcactccagcttgagtaacaatgtgaggctggtctcttaaaaaaagaaagaaagaaagaaagaaggaaggaaggaaggaaggaaggaaagaaagaaagaaagaaagaaagaaagaaagaaagaaagaaagaaagaaagagaaagaaagaaagaaaaaagaaaggactgtagagagccaaaagccaaagggtcatgaccaactctgcattccactgaaggctatatgattaaacagcaaactgtttatcatgaatgcaggatgtgggcaaactcacatctgccctgccgccagaaggtatgctgagtgcaattactccctggcaccatgctccttgaggttatctactgaaacatctggaggctactgttcagagaatgcagtcgtgcaagcctgcaccaagtcaagcagctgactgacaaccacccgcttctccctatctcctttactcaataaatatgaagggctctaaaagctcaggactcttgctcactagaagcaaggagcccctgaccccttcttccaaatatactcttttgtctttgtctttattcctgtgtccgtccccctttgttcagtccacaggcattggggctgcaacaaaggataaaaaaaacattgaagaacacacaaagaaatggaaagctatcccatgttcatagattgtaagaatattttaaaatgattaaaatgtccatactaccaaaagtgatctgcaaattcagcacaatccctatcaacactccaatgctatttttcacagataaaaaaagaaaaaaccctaaaacttttatacaaccacaaaaaactccaaagagccaaagcagtgttgaaaaagaacatgctagaggcatcatactttctgatttcaaactatattataaaggtacagcaatcctaacagtataatactggcataaaaacacacagagaacaatcaaacacaagagagcccagaaataaacatgcacatatacaactagcctttgacaagggcaccaagaatatacaatgaggaaaggacagtctcatcaataaatcctgtcgggaaaactgtatattcacattcaaaagaatatgaaactggacccttatctcacactatatgcaaagataaactcaaaatagattaaagatttaaatatatgatctaaaaccgtaaaaccccagaaaatagaaaaaaagctccttgacattgatcttggcaatgatttttttggatatgacaccaaaagcccaggcaacaaatggtgggactacatcaaactaaaaagtgggactatgtccaactaaaaagtttggccaggcgcagtggctcatgcctgtaatcccagcactttgggacgccaagacaggcagagcacttgaggtcaggagttcgagaccagcctggccaacatggtgagaccctgtctctactaaaaaattagctgggagtggtggtgcaacctgtaataccagctactacgggggctgaggcaggagaatcatttgaactcggaaggcacacattgcagtgaactgagattgagccaccacactctagcctgggcaacagagtgagactccattttgggggtggggtgggggaggggcaaagctcctgcacaccaaaggaaacaatgaactaaatgaaaaagcaatttgtaagatggaagtatgtatctgcaaaccatatatttaataagtggttaatatccaaaatatataaaaactcctacaattctacagcaaaataccccaaataatctcaataaaaatgggcaaaggacctgaacattttccaaataagacatacaaatgaccaacaggtatataataagatgctcaagatcactaatcatcagaggaatgctaatcaaaaccaccataagctatcacctcatacctcttacgaaggctattttaaataggcaagagataacaggtgttagcatgatatggagaaaaatgagcccttgtacactgttgctgggagtgtacatcagtacagccattatgaaaaacactatggacattcttcaaaatattaaaaatagaacaacaatgcaatccagcaatcccatttctgggtatatatccaaaggaaataaatgaaaccagtatctttaagagacatctaggccaggcatagcagttcatggctgtaatcccagcactctgagaagctgaggcgacaagatcacttgacaccagtagttagagatcatgctggacaacatagcagagaccatgtatctgctgaaaaaacacagacaaaaacaaaaaaatggctgggtgtggcggctcacgcctgtaatcctaacactttgggaggccaaggcgggcagatcacgaggtcaggagttcgagaccagcctggccaacatggtgaaaccctgtctctactaaaaacacaaaaagctgggcgtggtggcgggtgcctgtaatatcagctactcgggaggctgaggcaggagaatcatttgaacctaggaagtggaggttgtagtgagctgagattgcaccattgcactccagcctggacaacagggtgaggctctgtctcaaaaaaaaagaaaaccttacaaaatatctgtcccccatgatcactacagtattattcataacagccaagatatggaaacaacccaagtgcccatccatgaataaatatgtgtgtatatagacatatacagagtgttcatgtgtacatatatataatggaatattatccaaccctaaaaagaagaaaatcctgctatttgcaacaacatggatgaacctggaagacattatgctaggtgaaataagacagacactaaaagacaattactgtatgacctcacaagtggaatctaaaaaagtccaattgatagtaacagggtagaacagttgttgccacaggctgctggggggtgaaaatggaaaatgttggttaaagggtacaaattttctgttataaaatgaagaagttctgaggaagctaatgtacaccatggtgactatactatattggacactttaacagtttggaaagtttttgaaaaatctaataaattatggggtaaaagttcaaaaaatgatggcacttaatattcagaaatgaatgagatcagctgattattggatgccaccaaatcttatttctggagttagcaactataggaaagaagcaattgaataaaatgtatctcaagcttccaaaataacaattaattaactgtaaagcaactacaaagaaaaaagtaaattcattacaaaaaaacaagactttcaatgcttctgcgaagacataccttgtaggcctagtgtggtggctcacatctgtaattccagtgcgttgagaggctgaggtggaaagactgcttgaggccaggaagtagaagctgcagtgagccgagatcatgccactgctctccagcctaggcggcagagagagaccatgtccccccccaaaacaaaacagaacaaagccaaaaaaaacaccaaagacatatcttgtagtgacagtcagtcatttcttgccccatttctcccctcctttatgctctactccatcattgggaagaagagagttaccacaaataactggatcaagtcactgccctctggctaaataggaattccaaatatcttttgatacaaatacatacaaaatgcacaaggcttatagaaaaaactttggtgattttcatcctcatgagtacaacttaaacatatttcaaatcagagtataaagccacaaatcaatatattacaaccaccatccatatccaatcaactgtcacgcatctggatggggtcctctcccgctttcttcacggctatgtgtttccctctctcattctgagcgtcttttttttctccttttctgttttgcacccctttctttattccctcttttatgtctgttctgcccaatgctctgcaacttacttcacctctcgtagctctttctccccaatctttccgattgtccccaatctccacgtatttctgcctcttttcccccatctaagctccctctctgctctccttgttaaattccctcttccctgttacatctcctttgttcccactctctagcacccccaatttcctaggcttactccctgctgtggttctccctctactctgcttgtcacccactgccctctctccctctctttcagtcccagcaccacgtagctctgtcagccgcggctccaactctttcaccttctccccactgtctgtctgtctgcagtgcctcctcctttgccgccccactctattttgctgcccttcatctctctgaaggtcccctttttttctaaatttctctgtgtgcttttctccccctgctactttttccatccgttctctttcactcttgctctctttgcaagtccctaaagtatcatccattttgccgtgtatttatgggtctccctcattcttttctcctcagtttttccttttgctccgtcgttccccgtcttttcctctcctgatccctctcacccacacattcgggaggaaaggggaggaataggatgcccacctcccggaagagcacattttccagtggagtaaaatttgggaaggaagaacactgggtgtcacaagacagactcaggtaacctgtcccaacggggagtcaagaaaagcagtggctgtgaaggggaagcctggggagcggaaggacccggcgtgaggacgacacgaggtggcgcggagaacgatgtctcacgacagggagggtctgcagaatcccaggacgtgggaggagaagcggctccttcaggagccggacagtgggcgctcccctccaggggcagacgacggaggagctcggggatcgcgaagggcgctagtccacatcccgaatgaggactcgacttggcgcggggcccaagcagagggttttaagcgggaacactacctgaatggggttgtctacatggtcctaaggaagaaaggcagagagcaaggaacggcctcagagagattttaaaccgaaagggaagcaattctcctacttacttgggacgaaggggctgttgcgggtattttaaggtccgtagcgatccccaggtcacgggtatggagaaccgaggactgcgaagtgcacgtttaatcaaggtagacgaagagaagcaaacgtttaatccaggtagactgaaacacactcatagcgacgtggcctttccccagcgcgatctgcttccgggtgtgcaggaaactgggcgcggaaagaaaaactgggcggcctgggggcggggcctaggcggggcgcgactaggaaagggctgggcggaaagactggcctgacttgggagtggcccgaaagggtggtgggaggcccagggcggtagggggcgtgactaggtggggcttggctggaccgaaaactgggatgaagcggggcctccaggggtgggcggggccgaggcggggcctgttctccactccgcctctcacccagcaggattttgttttccaggtttgggagtatttgtgactatttcttgtcctgtgaagcagcgttgctccttgcccattttaaattaatgtttcagaatttaaggttgaatcttaaagttgtggtccacttatactggaaactaagatgatttattcttaacaagttgaactgatttaagtcaaaaccgatttttccgagcctggtggactccatccagtcttaccagaaaagctgaagctactcagtagtcagggaactgggatctcggtggggattggatgtggagcagtgactggatccaggaacccagaagacattatgccaagcgaaatgtgctagacacagtgtagaaaatgaaataagtagaggttcctcttcaaagggactttcctcccagtctaattgagaatagatagtaacctctcttagaagcaaaatttactcaaagacctgtgctaatattcttaaatatctgctagccataatagataaatcaatatactctgtgttcttagctcccacattttagcctagatatttgccctggcatgcctgaattgttccaagcaagcattaggtcacagcctattcctcttccttatttggaagtgtttttgcctctctcagccttccacaagttacttcctctcttcctttgttctcctctgcctttgcctcttttgggaagttctaaggtgctagccaatcaggtcaagcacagaattgggtccgattccagccaatggaaaccagacacagcagtagggtggacgcgtcaggttattattattattattttttttgagacggagtctcgttctttcgcccaggccggagtgcagtggcgctatctcggctcactgcaagctctgcctcctgggttcacgccattctcctgcctcagcctcccgagtagctgggactagaggcacctgccactgcgcccagctaattttttgtatttttagtagagacggggtttcactgcgttagccaggatggtctcgatctcctgacctcgtgatccgcccacctcggcctcccaaagtgctgggattacaggcatgagccaccgcgcccggccagatgcgtcaggttataaatgacccttctcttttgttcatgtgtactctcgtggcaagactgctagtgagcagcaccctttctgcagaaagtaaactagccttgctgagagatcctttgtctcagtgttgatttttgcgacactgagcacccgttcccaacacacacaaagaaacatacttcatgcacttacttacacgtgctaagtacaaacatcaaattcagagtaacaaagtagaagggtggtttccagggctgagggtgtttcctatgcctgtcccaccattgtattttggaagcagataacttctctggcttcacagattcacagctgggcagaaactttgcctcaggatgaaccacaccttgtgtctcacccatatgtgattcagataatatttaggtgatatttgggccttagagttgatactgaaatggattaagacttttcagatgggccaggcaaggtagcttaggcctgtaaccccaacaattcaggaggccgagtctggcagattacttgagctcaggagttcaagaccagcctgggcacatagcaagaaccccgtctctacagaagatataaaaattagccatgcttagtggcacactcctgtagtcccagctacttgggcggctgaagtggcaggatcacttaaggccaaggatttgagaccagcctgggcaacatagtcagaccccatctctacaaaaaattaaattagccaggcatggtggcctgcatgtgtggtcccagctattgggaggctgaggcaggaggatcacttgagcccaggaggtcgagactgtgacaagtcatgattacgccactgcactccagcctgggtgacagagagagaccccatctcaaataaataaataaaagatttttgttctgatgggagtgaagggatcttgcatgtaagaaggacataaagtttaggagtccagaacacagtgtgttatgagcagaaaaatttccacacacaaaaaaaaccctatcttgaagtcctaatacccagtacctcagaatataactgtatttggatatatggcatctacaggagtgatcaagtaaaaataagcttgttaaagtgggttctgatccaatctggctgatttctttataagaagaggagattcagctgggcaaactggcttgcccctgtaatctccacattttaggaggccgaggtgggcagttccagcccagcctgggcaacatggtgagaccctgtttctactaaaaatacaaaaattacctggcaatggtgacccacacctgtactcccagctactgaggaggctgaggtgggagatttgcttgagcctgggaggcagaggttgcagtgagccaagatcacaccactgcactccagcctggaagtcagagtgagactcttgtctcaataaataaacaaatacataaatgaaagataacgccaaggaagcagggagctaacttgccttcttctgttaggtgtttgatgaaaaattgaagcagaaagtttatgagctatgtatgttatctgcgcagaagggctatatggcctaagccagaaagaaaaacagacctacagcttatctgcttcctgtattttgtttatatgtcctggaccatgaagaaaggcagttttttaaaattttgttttgttttgtttttttgaggcagagtctccctctgtcacccaggctggaatgcagtggcatgatctcagctcactgcaaccttcgcctcctgggttcaagcaattctcgagcctcaggctccagagtagcagggactacaagcacccacgaccacgcccaactaatttttttcttttttttgtattttcgtagagacagggtttcaccatgttgcccagggtggtctggagctcctgagctcaggcaatttgaccgccttggcatcccagagtgctaggattacaggcgtgagccaccgcacctggcctagaaaggcagatttatagcttatttgctttatctctttgctttcccctggtcctgccaggctgactccttttctctaattaggtctccacagactataccataaaagtgcatttttctcaccctcctataaaatccctggactcctagttttactacaaataaaccaggattctatttcccagtatgaaaagtttgtcagaaaaaaagaggtagcacgggaccttctttcttttcttcaaaactaattcacctcctcttcttctctttcctgtctctctcttcctagactggcctgcgcagttctagatccccagtgaatccttgggttgacatacaagggacgaagaacctataggaaagggaaatctctagctctcagaggtggctttttggatgtctggatgcattcataaccatcctcgtgttgccagaaaggggtcctgatccagatcctgaaaccgccattgcaaattataactgagaattattacagtgaaagggatccgacctaaccaactccatcttgcttttaacctccaagctgcctttgtccactcctgggtgtaggccaaactagctttgggaggaacttagtttatcttttaaaataagggcattaatagccctttcccaaaacaaatgccctttctgcttgggactagactgcctttataggattaacaagttagtcacaagattagaaactatagtttaggagtcatgcagctagaggctacaagattgtcacctttcccaaattgttcctgggaataacatcagtattttaaaacctaagatcagtgtttgagaaattttgcagtccctgcacttgatggatcacctgacacccagatcaataaactgactcatctggtcttgtgacaccacccaggaactgactcagtgcaaaaggacagtgtcaactctctgatttcatctctgaacaaccagtcatcactctggactcactggcccctacccatcaaattatccttaaaaaccctgatccccaagatttcagggagactcatttgagtaataataaaacttcagtctcctgtacagccagctccacatgaattaaactctttctctattacaatttccctgtcttgaggaattggctctgtctaggcagcagaaaaagagaacctattaggcagttaaacccagaagaaggggttcttggatcttgtgcaagaaagaattaggggggagtccagagagtaaagtgacagcaagttttttaagaaagtaaaggaataaggcagggtgcactggctcacacctgtaatcccagcactttgggaggctgaggtgtgaaaattgcttgaacccaggagtttgagacaagcctgggcaacatggcaaaaccccatctctacaaaaaaaaaaaaaaattagccaagggtggtggcatgcacctgtagtctctgctactcgggaggctgaggtgggaagattgctcaagcctgggaggtggaggttgcagtgacctgagatcacaccactgcactattgcttgggcaacacaaccactctctctcaaaaaaaaaaaaaaaaaaaaaacatatatattagatagatagattcagacagtttttatttcaacactgaatgtttacttttgaaactcctgacgtttaagttgataaaaactcaattttccccatgctaaaaactttatacatgtcctttcttcatgcatacatagaacccttcacacaatataattgttggaagtgtttctgaaatactgtttagacaaattacctatatttttacacctgtactataaaattaatatctaacagacaataaatattaaattatttaatagaagaattatttttcaaaggctaatgatttcacagctgtagcaaaacttttttctttttttttttgagatgaggtctcactctgttgcccaggctgcagtgcagcgatgtaatcacaccccacagcagcctccacctccccaggctcaggcaataccccaacctcagtttttgtatttttagtagagatggggtttcaccatgttgcccaaactagtctaaaactcctaggttcaagcgatctccccacccccacattctaaagtgctggcattgcaggcgtgaaccactgtgcctggccaaaatgtaattttaaaaataatttttaaaatcattatacaatttcctagaaacgatttaatccaatttaaagatttacatttctttccttgtacttcagtgaaaaacttataggattagtaaatcaaggtggtattttcagatttgtatggcaaaaaaatatgcggagacctgacagatgtaaaggatgtattctatcaatatatggagggtcccttacattttaagttcagtgaaagaactggaatgatacaagataatgaactaaaattgtataatgtaaaagcaagagctctgttgctaatgtacagctgtatcagttggatttttaaaaacccaacatactaatttggcagggtgcggtggctcatacctgtaatcccaacactttgcgaggccaaggtggatggatcacttgaagtcaggatttcgagaccagcctgatcaacatggtgaaaccccatctctacaaaaaaatacaaaaattagctggatttggtggcatgcacctgtagtcccagctacttgggaagctgaggtaggagaattacctgagcccaggaggtggaggttgcagtgtgctgagactgtgccactgcactccaacctgggtgacaaagcaagatcctgtctcaaaatattataacatgtgacagtgcagcttccagcagaaataatctgttcctcttttgctcacaccaaatattcacccccacttctaaaaaatataaaagaataagccaaaatgtaacttcaagtcacaagcaaggatctcatgacagtctcatgagacttcttttcattgagagcccagtagagttctcctcactcacaacacttcattgtggaacagaaaaatgaaacctgaataaaccctcccatccagaaaaggaaaataaagaaggtaccccgtagtttctgtttcacagcaaatgtgcaatgttgctgagaagatgagtcagggactgattccacaaggtcaagaatgaacaacagtccttttcatggctacagttctcctgagaatgtttccagtccattgtgatttgttgttcttgacttcacctgatgacatccctaatacagtatcagaaagtatgccttccttgtgcagtaagcacctttctccagctacttctatttatttatttatttatttatttatttatttatttatttatttatttttaagacaggctctgttgcccaggctggagtgcagtggcactatctcggctcactgcaaccttcacctcccagattcaagtgatcctcctgcctcagcctccagagtacccagctacttcattcccacaaaaatttaccatccaaaggattattataaatctatatttagttttgtttttagaaaatactatggactggtagaagtctcaaaatacaacacgactaaaaatacagaaattagccaggcatgacagtgtgcatctgtaatcccagctactctgaaggctgaggcaggagaatcacttgagcccaggagatggaggttgcagtgagctaagattcagctattgcactccagcctgagccacagagagagactctgtctcaaaaataaataaataaatatttttggtaggaaagcttaaagaaaaataattctatatgagaaagaatcttgtatcagaaattttgtcctggaataaaatgactgattgtataagaaagatgaatgttcaggaaaaacaagaaatcccacacatgtcatgaatggtctgtgtaagtcataataagattgatgaaaaaaagttttatgtgatcaaattcactataattaaagggaaattataatggtctttctagagattgggttttgattttaaaaaacaccacttatacactaaagaattggttcaaactacaaaattttgttaagcggtgctttaaataaattatgaaacataatttattcaatgtaaagttcaagttttatggaatctcactgttttcagctttctctcccctcttaaaaggcctgaaatcataactttttcacctaattttcagctcctgtagcctttttttctttgggttctaactgttgtggcctgacactataaaatgttttatttttgaggtctaaaggaaatgtttctttccaaacataatatctcccatagggaacagcagtcacactgtagaagggcttttcttttgcctttggaaaactggcctactaaacagatctcacactttatcaaagtaattcctgtgtcagtattactaagtttggtttggttacaaggaaatttaaattaaatttttttaaattaagtttattatgtccatataactttccgtatatgcttttaggtccctgttccattcagttaaagggctttgactcctgggtctaaaaaggacaccaagtcttgctaaatcttaaacactgacagcagttcaagcctcatcttcagacccagtagaagttcctaatcaaaataaactgtgtttgtgaaacacagggcaagaaattaaaactattcaactcctcaagtaccagtggttatactgaaagaagtggacatgtgagattgtcagggtcaatttttagagctgaaataagtttggtttctctagaaattaactatcaatttcaaaggcaaattgttgcaagaccagcatatgagcccctgcgtcagattaacaaggttgtcttggagcattagcccaccttttttttattctggagatggagtctcactctgttgccgaggctggagtgcaatagtgcgatctgggctcactgcaacctccacctcatgggttcaagtgattctcctgcctcagcctcccaagtagctggggtaacagacatgtgccatgatgcccagctaattttgtatttttagcagagatggggatttaccacgttggttaggctggtctcaaactcctgacctcaggtgattcacccacctcggcatcccaaagtgctgggattacaggcatgagccaccgtgcccagcctagcccactatttaataaagattatatagtgtataaaaaggctcatggaaattatacttacaggcaagatgattaaaattttatagtttgtttataaaatattgaaaaaccaatttaattggccttgtgccatttttactagggaatattgtttgggaaattaagtcttttctctcaaaaaataaaggttgccacctttttttgaaatctttgcgataccactttggttaaatgaatcacttattttataatggcctgtgatcctattttatgatatcaagtgttttaaactttttatatttgacaagctttccaaagtcacattttaacttgcgtcgtcattaaacttttgttaatcccct
